(19) United States
(12) Patent Application Publication
(10) Pub. No.: US 2023/0122079 A1
(43) Pub. Date: Apr. 20, 2023

(54) MASKED IL12 FUSION PROTEINS AND METHODS OF USE THEREOF

(71) Applicant: Zymeworks Inc., Vancouver (CA)

(72) Inventors: Ryan Blackler, Vancouver (CA); Gesa Volkers, Vancouver (CA); David Douda, Vancouver (CA); Thomas Spreter Von Kreudenstein, Vancouver (CA); Genevieve Desjardins, Vancouver (CA); Nicole Afacan, Vancouver (CA)

(21) Appl. No.: 17/914,261

(22) PCT Filed: Mar. 23, 2021
(86) PCT No.: PCT/CA2021/050383

§ 371 Date: Sep. 23, 2022

Related U.S. Application Data
(60) Provisional application No. 63/146,567, filed on Feb. 5, 2021.
(60) Provisional application No. 62/993,334, filed on Mar. 23, 2020.

(51) Int. Cl. C07K 14/54; C07K 14/715; A61P 35/00; C07K 16/24

(52) U.S. Cl. CPC C07K 14/5434; C07K 14/7155; A61P 35/00; C07K 16/244; C07K 2319/30; C07K 2319/50; C07K 2317/622; A61K 38/00

(57) ABSTRACT

The present disclosure relates to masked IL12 fusion proteins, compositions comprising the same and methods of using the compositions for the treatment of a variety of diseases including cancer.

### TECHNICAL FIELD

[0001] The present disclosure relates to masked IL12 fusion proteins, compositions comprising the same and methods of using the compositions for the treatment of a variety of diseases including cancer.

### BACKGROUND

[0002] Interleukin 12 (IL12) was the first recognized member of a family of heterodimeric cytokines that includes IL12, IL23, IL27, IL35, and IL39. IL12 and IL23 are pro-inflammatory cytokines important for development of T helper 1 (Th-1) and T helper 17 (Th-17) T cell subsets, while IL27 and IL35 are potent inhibitory cytokines. IL39 is an important cytokine in regulating innate and/or adaptive immune response. L12 can directly enhance the activity of effector CD4 and CD8 T cells as well as natural killer (NK) and NK T cells.

[0003] Interleukin-12 (IL12) is a heterodimeric molecule composed of an alpha chain (the p35 subunit) and a beta chain (the p40 subunit) covalently linked by a disulfide bridge to form the biologically active 70 kDa dimer. IL23 is a member of IL12 cytokine family and is also composed of two subunits: the p40 subunit that it shares with IL12 and p19. The IL12 receptor, or receptor complex, is composed of IL12Rβ1 and IL12Rβ2. The IL23 receptor complex (IL23R) consists of an IL23R subunit in complex with an IL12Rβ1 subunit, which is a common subunit for the IL12 receptor and interacts with Tyrosine kinase 2 (Tyk2). The IL23R is mainly expressed on immune cells, in particular T cells (e.g., Th17 and gamma delta T cells), macrophages, dendritic cells and NK cells (Duvallet et al., 2011). It has been recently shown that non-activated neutrophils express a basal amount of IL23R and that IL23R expression is increased upon cell activation (Chen et al., 2016).

[0004] Biologically, IL12 is an inflammatory cytokine that is produced in response to infection by a variety of cells of the immune system, including phagocytic cells, B cells and activated dendritic cells (Colombo and Trinchieri (2002), Cytokine and Growth Factor Reviews, 13: 155-168 and Hamza et al., “Interleukin-12 a Key Immunoregulatory Cytokine in Infection Applications” Int. J. Mol. Sci. 11; 789-806 (2010). IL12 plays an essential role in mediating the interaction of the innate and adaptive arms of the immune system, acting on T-cells and natural killer (NK) cells, enhancing the proliferation and activity of cytotoxic lymphocytes and the production of other inflammatory cytokines, especially interferon-gamma (IFN-gamma).

[0005] IL12 has been tested in human clinical trials as an immunotherapeutic agent for the treatment of a wide variety of cancers (Atkins et al. (1997), Clin. Cancer Res., 3: 409-17; Gollob et al. (2000), Clin. Cancer Res., 6: 1678-92; Hurteau et al. (2001), Gynecol. Oncol., 82: 7-10; and Youssoufian, et al. (2013) Surgical Oncology Clinics of North America, 22(4): 885-901), including renal, colon, and ovarian cancer, melanoma and T-cell lymphoma, and as an adjuvant for cancer vaccines (Lee et al. (2001), J. Clin. Oncol. 19: 3836-47). However, IL12 is toxic when administered systemically as a recombinant protein. Trinchieri, Adv. Immunol. 1998; 70:83-243. In order to maximize the anti-tumoral effect of IL12 while minimizing its systemic toxicity, IL12 gene therapy approaches have been proposed to allow production of the cytokine at the tumor site, thereby achieving high local levels of IL12 with low serum concentration. Qian et al., Cell Research (2006) 16: 182-188; US Patent Publication 20130195800.

[0006] Since IL12 is a heterodimeric molecule composed of an alpha chain (the p35 subunit) and a beta chain (the p40 subunit), the simultaneous expression of the two subunits is necessary for the production of the biologically active heterodimer. Recombinant IL12 expression has been achieved using bicistronic vectors containing the p40 and p35 subunits separated by an IRES (internal ribosome entry site) sequence to allow independent expression of both subunits from a single vector. However, use of IRES sequences can impair protein expression. Mizuguchi et al., Mol Ther (2000); 1: 376-382. Moreover, unequal expression of the p40 and p35 subunits can lead to the formation of homodimeric proteins (e.g., p40-p40) which can have inhibitory effects on IL12 signaling. Gillessen et al. Eur. J. Immunol. 25(1):200-6 (1995).

[0007] As an alternative to bicistronic expression of the IL12 subunits, functional single chain IL12 fusion proteins have been produced by joining the p40 and p35 subunits with (Gly4Ser)3 or Gly6Ser linkers. Lieschke et al., (1997), Nature Biotechnology 15, 35-40; Lode et al., (1998), PNAS 95, 2475-2480. (These forms of p40-linker-p35 or p35-linker-p40 IL12 configurations may be referred to herein as “single chain IL12 (scIL12)”).

[0008] Human IL12 p70 (i.e., dimer of p35 and p40) has a reported in vivo half-life of 5-19 hours which, when administered as a therapeutic compound, can result in significant systemic toxicity. See e.g., Car et al. “The Toxicology of Interleukin-12: A Review” Toxicologic Path. 27:1, 58-63 (1999); Robertson et al. “Immunological Effects of Interleukin 12 Administered by Bolus Intravenous Injection to Patients with Cancer” Clin. Cancer Res. 5:9-16 (1999); Atkins et al. “Phase I Evaluation of Intravenous Recombinant Human Interleukin 12 in Patients with Advance Malignancies” Clin. Cancer Res. 3:409-417 (1997). Preclinical studies in murine tumor treatment models demonstrate powerful antitumor effects following the systemic administration of IL12. In humans, however, attempts to systemically administer recombinant IL12 resulted in significant toxicities including patient deaths and limited efficacy. Thus, there remains a need in the art for improved therapeutic control of in vivo delivered forms of IL12.

### SUMMARY

[0009] One aspect of the present disclosure provides a masked interleukin 12 (IL12) fusion protein, comprising: a) an Fc domain comprising a first Fc polypeptide and a second Fc polypeptide; b) a masking moiety (MM); and c) an IL12 polypeptide; wherein the masking moiety is fused to the first Fc polypeptide by a first linker; and optionally, wherein the masking moiety further comprises a second linker; wherein the IL12 polypeptide is fused to the second Fc polypeptide by a third linker; wherein at least one of the first, second or third linkers is protease cleavable; and wherein the IL12 activity of the masked IL12 fusion protein is attenuated as compared to the IL12 activity of the IL12 containing polypeptide released after cleavage of the at least one protease cleavable linker. In some embodiments of the masked IL12 fusion proteins, the first linker is protease cleavable and optionally, the second linker is protease cleavable. In some embodiments of the masked IL12 fusion proteins, the first linker is optionally protease cleavable and the second linker is protease cleavable. In some embodiments of the masked IL12 fusion proteins, the third linker is protease cleavable and optionally, the first or second linker is protease cleavable, or both. In some embodiments of the masked IL12 fusion proteins, the first linker comprises a cleavage sequence selected from the group consisting of the cleavage sites listed in Table 3 and Table 24. In some embodiments of the masked IL12 fusion proteins herein, the first linker comprises a cleavage sequence having the amino acid sequence MSGRSANA (SEQ ID NO:10). In some embodiments, the protease cleavable linker is cleaved by a protease selected from the group consisting of a matrix metalloproteinase (MMP), a matriptase, a cathepsin, a kallikrein, a caspase, a serine protease, thrombin, chymase, carboxypeptidase A, tryptase, cathepsin G, cathepsin L, ADAM metalloproteinase, and an elastase. In one embodiment, the first, second and third linkers are cleaved by the same protease.

[0010] In some embodiments of the masked IL12 fusion proteins herein, the masking moiety is a single-chain Fv (scFv) antibody fragment, an IL12 receptor β2 subunit (IL12Rβ2) or an IL12-binding fragment thereof, or an IL12 receptor 131 subunit (IL12Rβ1) or an IL12-binding fragment thereof. In certain embodiments, the scFv comprises the VHCDR1-3 having the amino acid sequences set forth in SEQ ID NOS:13-15, respectively and the VLCDR1-3 having the amino acid sequence set forth in SEQ ID NOS: 16-18, respectively. In some embodiments, the scFv comprises a VH and VL comprising the amino acid sequence set forth in SEQ ID NOs:11 and 12, respectively; or a VH and VL comprising the amino acid sequence set forth in SEQ ID NOs:255 and 256, respectively. In some embodiments, the scFv comprises a variant of the VH having the amino acid sequence set forth in SEQ ID NO:11 wherein the variant is selected from the group consisting of H_Y32A; H_F27V; H_Y52AV; H_R52E; H_R52E_Y52AV; H_H95D; H_G96T; and H_H98A, according to Kabat numbering; and the VL having the amino acid sequence set forth in SEQ ID NO: 12. In some embodiments, the masking moiety is selected from an ECD of human IL12Rβ2, amino acids 24-321 of human Th12Rβ2 (IL12Rβ224-321), amino acids 24-124 of human IL12Rβ2 (IL12Rβ24-124), amino acids 24-240 of human IL12Rβ1 (IL12Rβ124-240) and an IL23R ECD.

[0011] In some embodiments of the masked IL12 fusion protein herein, the IL12 polypeptide comprises the amino acid sequence set forth in SEQ ID NO:22 or 23. In some embodiments, the IL12 polypeptide comprises the p40 polypeptide amino acid sequence set forth in SEQ ID NO:22 and the p35 IL12 polypeptide is non-covalently bound to the p40 polypeptide. In some embodiments, the IL12 polypeptide comprises the p35 polypeptide amino acid sequence set forth in SEQ ID NO:23 and the p40 IL12 polypeptide is non-covalently bound to the p40 polypeptide.

[0012] In some embodiments of the masked IL12 fusion proteins herein, the IL12 is a single chain IL12 polypeptide selected from a single chain IL12 polypeptide having the orientation p35-linker-p40 or p40-linker-p35. In some embodiments, the fusion protein is selected from variants 29243, 29244, 31277, 32039, 32042, 32045, 33507, 35425, 32041, 35436, 35437, 32862 and 32454. In some embodiments, the single chain IL12 polypeptide is a p40-linker-p35 polypeptide that is fused to the second Fc polypeptide at the p40 polypeptide. In some embodiments, the single chain IL12 polypeptide is a p35-linker-p40 polypeptide that is fused to the second Fc polypeptide at the p35 polypeptide. In some embodiments, the single chain IL12 polypeptide is fused to the c-terminal end of the second Fc polypeptide. In some embodiment of the masked IL12 fusion proteins, the single chain IL12 polypeptide is fused to the c-terminal end of the second Fc polypeptide and the masking moiety is fused to the c-terminal end of the first Fc polypeptide. In some embodiments, the single chain IL12 polypeptide is fused to the second Fc polypeptide and the third linker is protease cleavable. In some embodiments, the P40 domain of the IL12 polypeptide has been modified to be more resistant to proteolytic cleavage as compared to an unmodified P40 domain. In some embodiments, the masking moiety is a single-chain Fv (scFv) antibody fragment; and the IL12 fusion protein further comprises a second masking moiety comprising an additional scFv fused by a fourth linker to the p35 domain of the IL12 polypeptide. In some embodiments, the first and fourth linkers are protease cleavable. In some embodiments, the masking moiety comprises a first scFv fused to a second scFv by a fourth linker. In some embodiments, the first and fourth linkers are protease cleavable. In some embodiments, the masking moiety is in the following orientation: first Fc polypeptide-L1-VH-VL-L4-VH-VL; or first Fc polypeptide-L1-VH-VL-L4-VL-VH. In some embodiments, the first and fourth linkers are protease cleavable.

[0013] In some embodiment of the masked IL12 fusion proteins, the masking moiety comprises an IL12 receptor β2 subunit (IL12Rβ2) or an IL12-binding fragment thereof, and an IL12 receptor 131 subunit (IL12Rβ1) or an IL12-binding fragment thereof, fused by the second linker. In some embodiments, the masking moiety comprises an IL12Rβ2-Ig domain fused to the c-terminal end of the first Fc polypeptide and the IL12Rβ1 fused by the second linker to the c-terminal end of the IL12Rβ2-Ig domain. In some embodiments, the first and the second linker are protease cleavable. In some embodiments, the masking moiety is an IL12Rβ1 or an IL12-binding fragment thereof; and wherein the IL12 fusion protein further comprises a second masking moiety comprising an IL12Rβ2 or an IL12-binding fragment thereof fused by a fourth linker to the p35 domain of the IL12 polypeptide. In some embodiments, the first and the fourth linker are protease cleavable.

[0014] In some embodiments of the masked IL12 fusion proteins herein, the fusion protein further comprises a targeting domain. In some embodiments, the targeting domain specifically binds a tumor-associated antigen.

[0015] In some embodiments of the masked IL12 fusion proteins herein, the first Fc polypeptide comprises a first CH3 domain and the second Fc polypeptide comprises a second CH3 domain.

[0016] In some embodiments of the masked IL12 fusion proteins herein, the IL12 activity is determined by measuring relative cell abundance or cytokine production of a cell or a cell line that is sensitive to IL12. In some embodiments, the cell or cell line is selected from PBMC, CD8+ T cells, a CTLL-2 cell line and an NK cell line. In some embodiments, the IL12 activity is determined by measuring IFNγ release by CD8+ T cells. In some embodiments, the IL12 activity is determined by measuring the relative cell abundance of NK cells.

[0017] In some embodiments of the masked IL12 fusion proteins, the first CH3 domain or the second CH3 domain or both comprise an asymmetric amino acid modification wherein the first and second CH3 domain preferentially pair to form a heterodimer rather than a homodimer.

[0018] One aspect of the present disclosure provides a masked interleukin 12 (IL12) fusion protein, comprising: a) an Fc domain comprising a first Fc polypeptide and a second Fc polypeptide; b) a masking moiety (MM); and c) an IL12 polypeptide; wherein the masking moiety is fused to the first Fc polypeptide by a first linker; and optionally, wherein the masking moiety further comprises a second linker; wherein the IL12 polypeptide is fused to the second Fc polypeptide by a third linker; optionally, wherein at least one of the first, second or third linkers is protease cleavable; and wherein the IL12 activity of the masked IL12 fusion protein is attenuated as compared to the IL12 activity of a control IL12 polypeptide.

[0019] One aspect of the present disclosure provides a masked IL12 fusion protein, comprising: a) an Fc domain comprising a first Fc polypeptide and a second Fc polypeptide; b) a first MM and a second MM; and c) an IL12 polypeptide; wherein the IL12 polypeptide comprises a p35 polypeptide and a p40 polypeptide; wherein the first MM is fused to the first Fc polypeptide by a first linker; wherein the p35 polypeptide is fused to the first MM by a second linker; wherein the second MM is fused to the second Fc polypeptide by a third linker; and wherein the p40 polypeptide is non-covalently bound to the p35 polypeptide; and wherein at least one of the first, second or third linkers is protease cleavable; and wherein the IL12 activity of the masked IL12 fusion protein is attenuated as compared to the IL12 activity of the IL12 containing polypeptide released after cleavage of the at least one protease cleavable linker.

[0020] One aspect of the present disclosure provides a masked IL12 fusion protein, comprising: a) an Fc domain comprising a first Fc polypeptide and a second Fc polypeptide; b) a first MM and a second MM; and c) an IL12 polypeptide; wherein the IL12 polypeptide comprises a p35 polypeptide and a p40 polypeptide; wherein the p35 polypeptide is fused to the first Fc polypeptide by a first linker; wherein the first MM is fused to the p35 polypeptide by a second linker; wherein the second MM is fused to the second Fc polypeptide by a third linker; and wherein the p40 polypeptide is non-covalently bound to the p35 polypeptide; and wherein at least one of the first, second or third linkers is protease cleavable; and wherein the IL12 activity of the masked IL12 fusion protein is attenuated as compared to the IL12 activity of the IL12 containing polypeptide released after cleavage of the at least one protease cleavable linker. In some embodiments, the first MM is fused to the C-terminal end of the first Fc polypeptide and wherein the second MM is fused to the C-terminal end of the second Fc polypeptide. In some embodiments, the p35 polypeptide is fused to the N-terminal end of the first Fc polypeptide and wherein the second MM is fused to the N-terminal end of the second Fc polypeptide.

[0021] One aspect of the present disclosure provides a composition comprising any of the masked IL12 fusion proteins described herein and a pharmaceutically acceptable excipient.

[0022] One aspect of the present disclosure provides a method of treating cancer in a subject comprising administering to the subject a therapeutically effective amount of a composition comprising any of the masked IL12 fusion proteins described herein and a pharmaceutically acceptable excipient.

[0023] One aspect of the present disclosure provides an isolated nucleic acid encoding a masked IL12 fusion protein as described herein.

[0024] One aspect of the present disclosure provides an expression vector comprising an isolated nucleic acid encoding a masked IL12 fusion protein as described herein.

[0025] One aspect of the present disclosure provides an isolated host cell comprising an isolated nucleic acid encoding a masked IL12 fusion protein as described herein or an expression vector comprising such an isolated nucleic acid.

[0026] One aspect of the present disclosure provides a method of making a masked IL12 fusion protein comprising culturing a host cell comprising an isolated nucleic acid encoding a masked IL12 fusion protein as described herein or an expression vector comprising such an isolated nucleic acid, under conditions suitable for expression of the masked IL12 fusion protein and optionally, recovering the masked IL12 fusion protein from the host cell culture medium.

[0027] One aspect of the present disclosure provides a masked interleukin 23 (IL23) fusion protein, comprising: a) an Fc domain comprising a first Fc polypeptide and a second Fc polypeptide; b) a masking moiety; c) a first protease cleavable linker; and d) an IL23 polypeptide; wherein the masking moiety is fused to the first Fc polypeptide by the first protease cleavable linker; and optionally, wherein the masking moiety further comprises a second protease cleavable linker; wherein the IL23 polypeptide is fused to the second Fc polypeptide; and wherein the IL23 activity of the masked IL23 fusion protein is attenuated as compared to the IL23 activity of the IL23 containing polypeptide released after cleavage of the protease cleavable linker. In some embodiments, the IL23 is a single chain IL23 polypeptide selected from a single chain IL23 polypeptide having the orientation p19-linker-p40 or p40-linker-p19. In some embodiments, the single chain IL23 polypeptide is a p40-linker-p19 polypeptide that is fused to the second Fc polypeptide at the p40 polypeptide. In some embodiments, the single chain IL23 polypeptide is a p19-linker-p40 polypeptide that is fused to the second Fc polypeptide at the p19 polypeptide. In some embodiments, the single chain IL23 polypeptide is fused to the c-terminal end of the second Fc polypeptide. In some embodiments, the single chain IL23 polypeptide is fused to the c-terminal end of the second Fc polypeptide and the masking moiety is fused to the c-terminal end of the first Fc polypeptide.

[0028] One aspect of the present disclosure provides a recombinant polypeptide comprising a protease cleavable linker (PCL) wherein the protease cleavable linker comprises the amino acid sequence MSGRSANA (SEQ ID NO:10). In some embodiments, the recombinant polypeptide comprises two heterologous polypeptides, a first polypeptide located amino (N) terminally to the PCL and a second polypeptide located carboxyl (C) terminally to the PCL. In some embodiments, the two heterologous polypeptides are selected from a cytokine polypeptide, an antibody, an antigen-binding fragment of an antibody and an Fc domain. In some embodiments, the recombinant polypeptide comprises a cytokine polypeptide, a MM, and an Fc domain. In some embodiments, the MM is a single-chain Fv (scFv) antibody fragment that binds to the cytokine or a cytokine receptor polypeptide or a cytokine-binding fragment thereof. In some embodiments, the recombinant polypeptide comprises an antibody or antigen binding fragment thereof that binds a target, and a MM that binds to the antibody or antigen binding fragment thereof and blocks binding of the antibody or antigen binding fragment thereof to the target.

[0029] One aspect of the present disclosure provides an isolated polypeptide comprising a PCL, wherein the PCL comprises the amino acid sequence of SEQ ID NO:10, wherein the PCL is a substrate for a protease, wherein the isolated polypeptide comprises at least one moiety (M) selected from the group consisting of a moiety that is located amino (N) terminally to the PCL (MN), a moiety that is located carboxyl (C) terminally to the PCL (MC), and combinations thereof, and wherein the MN or MC is selected from the group consisting of an antibody or antigen binding fragment thereof; a cytokine or a functional fragment thereof; a MM; a cytokine receptor or a functional fragment thereof; an immunomodulatory receptor, or functional fragment thereof; an immune checkpoint protein or a functional fragment thereof; a tumor associated antigen; a targeting domain; a therapeutic agent; an antineoplastic agent; a toxic agent; a drug; and a detectable label.

### BRIEF DESCRIPTION OF THE DRAWINGS

[0030] FIG. 1: Schematic diagrams of parental non-masked IL12 HetFc fusion protein variants

[0031] FIGS. 2A-2B: Three-dimensional structure of uPa (FIG. 2A, 5HGG.pdb) and matriptase (FIG. 2B, 3BN9.pdb) with a polypeptide bound to the catalytic site demonstrating the potential interactions of the 8 residue centered around the cleavage site between P1 and P1′.

[0032] FIG. 3A and FIG. 3B: Schematic diagrams of the one-armed antibody format and variant(s) used to develop protease specific cleavable sites, where P4-P4′ or X indicates the localization of the cleavage site.

[0033] FIGS. 4A-4B: Kinetic curves reporting cleavage of one-armed mesothelin blocked variants by matriptase (FIG. 4A) or uPa (FIG. 4B) over time.

[0034] FIG. 5: Schematic diagrams of masked IL12 HetFc fusion protein variants derived from parental non-masked variant v22951

[0035] FIG. 6: Schematic diagrams of masked IL12 HetFc fusion protein variants derived from parental non-masked variant v22945

[0036] FIG. 7: Schematic diagrams of masked IL12 HetFc fusion protein variants derived from parental non-masked variant v22946

[0037] FIG. 8: Schematic diagrams of masked IL12 HetFc fusion protein variants derived from parental non-masked variant v22948

[0038] FIG. 9: Schematic diagrams of masked IL12 HetFc fusion protein variants derived from parental non-masked variant v23086

[0039] FIGS. 10A, 10B, and 10C show effects of lead untreated or matriptase treated (+M) parental and antibody masked IL12 HetFc fusion v31277 on relative NK cell abundance.

[0040] FIG. 11A-FIG. 11D show effects of untreated or matriptase treated (+M) cleavable and noncleavable parental and antibody masked IL12 HetFc fusion protein variants on relative NK cell abundance.

[0041] FIG. 12A-FIG. 12O show effects of untreated or matriptase treated (+M) parental and antibody masked IL12 HetFc fusion protein variants on relative NK cell abundance.

[0042] FIG. 13A-FIG. 13C show effects of best untreated or matriptase treated (+M) parental and receptor masked IL12 HetFc fusion v32045 on relative NK cell abundance.

[0043] FIGS. 14A and 14B show effects of untreated or matriptase treated (+M) cleavable and noncleavable parental and receptor masked IL12 HetFc fusion protein variants on relative NK cell abundance.

[0044] FIG. 15A-FIG. 15E show effects of untreated or matriptase treated (+M) parental and receptor masked IL12 HetFc fusion protein variants on relative NK cell abundance.

[0045] FIG. 16A and FIG. 16B show effects of heparin binding mutant IL12 HetFc fusion proteins on relative NK cell abundance.

[0046] FIG. 17A-FIG. 17E show effects of untreated or matriptase treated (+M) heparin binding mutant parental and masked IL12 HetFc fusion protein variants on relative NK cell abundance.

[0047] FIG. 18A-FIG. 18F show effects of untreated or matriptase treated (+M) parental, antibody and receptor masked IL12 HetFc fusion protein variants derived from parental variant 22951 on CD8+ T cell IFNγ release.

[0048] FIG. 19A-FIG. 19D show effects of parental, non-masked IL12 HetFc fusion protein variants on the survival of mice engrafted with human PBMCs.

[0049] FIG. 20: Serum exposure of parental, non-masked IL12 HetFc fusions in mice engrafted with human PBMCs.

[0050] FIG. 21: Schematic diagrams of double-masked IL12 HetFc fusion protein variants.

[0051] FIG. 22: shows a schematic drawing of the structure of certain fusion proteins described in Example 16. By fusing PD-1 (checkered) and PD-L1 (striped) to the N termini of heavy and light chain, respectively, the paratope of a Fab (grey) can be sterically blocked by the Ig superfamily heterodimer that is formed between the two. Upon removal of one side of this mask via the TME-specific, proteolytic cleavage (bolt) of one of the linkers that is introduced between the masking domain and the Fab, part of the mask can be released and binding to the target can be restored. Furthermore, the part of the mask that remains covalently attached to the Fab adds functionality by binding to its immunomodulatory partner.

[0052] FIG. 23: shows a schematic drawing of a modified bispecific CD3×Her2 Fab×scFv Fc fusion protein described in Example 16. One arm of the antibody-like molecule contains the anti CD3 Fab that is blocked by a PD-1/PD-L1 mask, while the other arm contains an anti-Her2 scFv.

[0053] FIG. 24: shows reducing Caliper profiles of representative variants before (-uPa) and after uPa treatment (+uPa). Profiles for unmasked (30421), masked but uncleavable (30423), and masked cleavable variants (30430, 30436, 31934) are shown.

[0054] FIG. 25: shows native binding results of CD3 targeted variants to Jurkat cells as determined by ELISA. Results are shown for an unmasked variant (30421), constructs with only the PD-L1 or PD-1 moiety attached (31929, 31931), and variants with a full, uncleavable mask (30423) or with a full mask and a cleavable PD-L1 or PD-1 moiety (30430, 30436). For samples of variants 30423, 30430, 30436, uPa untreated (-uPa) and treated (+uPa) samples were tested.

[0055] FIG. 26: shows cell killing of JIMT-1 tumor cells by Pan T-cells as determined in a TDCC assay after treatment with engineered variants cross-linking T-cells and tumor cells. Results are portrayed for an unmasked variant (30421), a construct with only the PD-1 moiety attached to the heavy chain (31929), and variants with a full, uncleavable mask (30423) or with a full mask and a cleavable PD-L1 moiety on the light chain (30430). For variant 30430 uPa untreated (-uPa) and treated (+uPa) samples were tested. An irrelevant anti-RSV antibody (22277) was used as a negative control.

[0056] FIG. 27A and FIG. 27B: shows reduced potency in a CD8+ T cell IFNγ release assay induced by untreated double antibody masked IL12HetFc fusion protein compared to parental variant 30806. Matriptase treatment (+M) of double masked variant restores activity similar to 30806.

[0057] FIGS. 28A, 28B and 28C: show a range of reduced potency in a CD8+ T cell IFNγ release assay induced by non-masked and antibody masked IL12 HetFc fusion protein variants with mutations in IL-12p35 and p40 compared to parental variant 30806.

[0058] FIG. 29: shows that altering cleavable linker lengths in untreated antibody masked IL12 HetFc fusion protein variants has minimal effect on potency in a CD8+ T cell IFNγ release assay.

[0059] FIG. 30: shows solid human tumors from indications that may respond to treatment with protease cleavable IL-12Fc fusions due to the presence of high immune cell infiltration (CIBERSORT score) and high levels of proteases (transcripts per million).

[0060] FIG. 31: shows masked and non-masked IL12 HetFc fusions display antibody-like pharmacokinetic properties in stem cell humanized mice.

[0061] FIG. 32: Schematic diagrams of masked and non-masked IL12 HetFc fusion protein variants, where p35 and p40 domains may or may not contain additional mutations to reduce IL12 potency.

[0062] FIG. 33: shows the structures and sequence compositions of variants tested in Example 16, corresponding with Table 16.

### DETAILED DESCRIPTION

[0063] The present disclosure relates to masked cytokine fusion proteins that are unmasked or activated by protease cleavage. In particular, the present disclosure relates to masked IL12 family member cytokines and more specifically, to masked IL12 and IL23 fusion proteins. The present disclosure further provides compositions and kits comprising the masked cytokines described herein and methods of using the compositions for the treatment of a variety of diseases.

[0064] IL12 is an immunostimulatory cytokine capable of driving anti-tumor responses by the innate and adaptive immune cells. The use of IL12 as a therapeutic has been extensively studied in pre-clinical models of cancer including mouse models of melanoma, renal cell carcinoma, mammary carcinoma, and colon carcinoma. The anti-tumor activity of IL12 administrations has been shown even when IL12 was administered at later stages with large, established tumors in mice. The potent anti-tumor effects of IL12 in preclinical models led to clinical trials of recombinant IL12. Unfortunately, toxicities including treatment related deaths of two patients resulted in halting of clinical trials for recombinant IL12. It is also noteworthy that recombinant cytokines have poor PK due to their small size. The present disclosure provides IL12 fusion proteins that circumvent the toxicities by blocking the cytokine activity with the use of a masking moiety that blocks IL12 binding and/or activity. The IL12 fusion protein masking moiety is designed to be released upon reaching the tumor microenvironment or other targeted anatomical location. Upon release of the masking moiety in the tumor microenvironment or other targeted anatomical location, the IL12 fusion protein recovers anti-tumor activity. The toxicities associated with IL12 administrations are reduced by locally limiting the activity of the cytokines, e.g., limiting the cytokine activity to the tumor microenvironment or other particular location in the body (such as liver, kidney, lymph node etc.). The present disclosure also provides for improved pharmacokinetics of IL12 by fusion to an Fc domain.

### Definitions

[0065] Unless defined otherwise, all technical and scientific terms used herein have the same meaning as commonly understood by one of ordinary skill in the art.

[0066] As used herein, the term “about” refers to an approximately ±10% variation from a given value, unless otherwise indicated. It is to be understood that such a variation is always included in any given value provided herein, whether or not it is specifically referred to.

[0067] The use of the word “a” or “an” when used herein in conjunction with the term “comprising” may mean “one,” but it is also consistent in certain embodiments with the meaning of “one or more,” “at least one” or “one or more than one.”

[0068] As used herein, the terms “comprising,” “having,” “including” and “containing,” and grammatical variations thereof, are inclusive or open-ended and do not exclude additional, unrecited elements and/or method steps. The term “consisting essentially of” when used herein in connection with a composition, use or method, denotes that additional elements and/or method steps may be present, but that these additions do not materially affect the manner in which the recited composition, method or use functions. The term “consisting of” when used herein in connection with a composition, use or method, excludes the presence of additional elements and/or method steps. A composition, use or method described herein as comprising certain elements and/or steps may also, in certain embodiments consist essentially of those elements and/or steps, and in other embodiments consist of those elements and/or steps, whether or not these embodiments are specifically referred to.

[0069] By “fused” is meant that the components (e.g. a cytokine molecule and an Fc domain polypeptide or a masking moiety and an Fc domain polypeptide) are linked by peptide bonds, either directly or via one or more peptide linkers.

[0070] As used herein, the term “single-chain” refers to a molecule comprising amino acid monomers linearly linked by peptide bonds. In certain embodiments, one of the cytokine protein or domains is a single-chain cytokine molecule, i.e. an IL12 molecule wherein the p35 and the p40 domains are connected by a peptide linker to form a single peptide chain; or an IL23 molecule wherein the p19 and the p40 domains are connected by a peptide linker to form a single peptide chain.

[0071] It is contemplated that any embodiment discussed herein can be implemented with respect to any method, use or composition disclosed herein.

[0072] Particular features, structures and/or characteristics described in connection with an embodiment disclosed herein may be combined with features, structures and/or characteristics described in connection with another embodiment disclosed herein in any suitable manner to provide one or more further embodiments.

[0073] It is also to be understood that the positive recitation of a feature in one embodiment, serves as a basis for excluding the feature in an alternative embodiment. For example, where a list of options is presented for a given embodiment or claim, it is to be understood that one or more option may be deleted from the list and the shortened list may form an alternative embodiment, whether or not such an alternative embodiment is specifically referred to.

### Masked IL12/Protease Activatable IL12 Fusion Proteins

[0074] The present disclosure provides masked cytokine fusion proteins and, in particular, provides masked IL12 and IL23 fusion proteins, also referred to herein as masked IL12 HetFc fusion proteins. The masked IL12 fusion proteins described herein comprise an IL12 polypeptide, an Fc domain comprising a first Fc polypeptide and a second Fc polypeptide; a masking moiety (MM) that reduces, inhibits or blocks IL12 activity; and in certain embodiments, at least one protease cleavable linker; and optionally, additional linkers which may or may not also be protease cleavable. In certain embodiments, the masked IL12 fusion proteins may comprise two or more MM. Generally, the function of the masked IL12 fusion protein is to provide a biologically active IL12 protein that has reduced toxicity. In certain embodiments, the masked IL12 fusion proteins herein have therapeutically effective activity at local target sites, such as the tumor microenvironment (TME), while having substantially attenuated activity in the periphery. The masked IL12 fusion proteins herein provide an active IL12 protein with a broader therapeutic window. As used herein, “therapeutic window” refers to the range of dosages which can treat disease effectively without having toxic effects; e.g., as is in the area between adverse response and desired response is the therapeutic window. Examples of toxic effects of IL12 administration include, without limitation: skin toxicity, local inflammation, stomatitis, systemic inflammation, fatigue, weight loss, emesis, anorexia, hematologic toxicities, such as anemia, lymphopenia, neutropenia, thrombocytopenia, hypoproteinemia, hypophosphatemia, and hypocalcemia, enlargement of lymph nodes, splenomegaly, and bone marrow hyperplasia, bone marrow toxicities, muscle toxicities, neurologic toxicities, hepatic toxicities such as hepatic dysfunction, elevated transaminases, elevated aspartate aminotransferase (AST), elevated alanine aminotransferase (ALT), elevated alkaline phosphatase, hyperbilirubinemia, and hypoalbuminemia, elevated creatinine, diarrhea, dyspnea, and gastrointestinal hemorrhage. In some embodiments, toxic effects refer to dose-limiting toxicities. Other toxic effects of IL12 administration are known to those of ordinary skill in the art.

### Masked IL12 Fusion Protein Configurations

[0075] “Masked IL12 fusion protein” as used herein is specifically meant to include fusion proteins described herein comprising any cytokine from the IL12 family of heterodimeric cytokines and therefore, is meant specifically to include IL12 and IL23 masked fusion proteins. In certain places, “masked cytokine fusion protein” may be used and is similarly meant to include masked IL12 or IL23 fusion proteins. Additionally, the masked IL12 fusion proteins may be referred to herein as “masked HetFc IL12 fusion proteins” as the fusion proteins are in some embodiments made with the modified Fc polypeptides described herein. The terminology “masked IL12 fusion protein” and “masked cytokine fusion protein” also are meant to include any masked HetFc IL12 fusion proteins.

[0076] The masked IL12 fusion proteins of the present disclosure are provided in a variety of structural configurations (domain structures) that have been shown to provide unexpected benefits as compared to other configurations, in particular, improved masking, improved manufacturability, improved cleavage of the protease cleavable linker and/or improved IL12 activity post-cleavage. Exemplary structural configurations of the masked IL12 fusion proteins of the present disclosure are provided in FIGS. 5-9, 21 and 32 and are outlined in Table A below. Certain exemplary masked IL12 fusion proteins and unmasked parental IL12 fusion proteins described herein are provided in the Examples and are shown in Tables 1, 2, 10, 11, 14, 15, 16, and in Table 24 with specific reference to SEQ ID NOs in Table 25.

TABLE A
Masked Cytokine Configurations

| | | Chain 1 (HetFc 1) | Chain 2 (HetFc 2) | Chain 3 (other) |
|---|---|---|---|---|
| FIG. | Variant | (N to C) | (N to C) | (N to C) |
| 1 | v22945 | HetFc-p35 | HetFc | p40 |
| 1 | v22946 | p35-L-HetFc | HetFc | p40 |
| 1 | v22948 | p40-L-HetFc | HetFc | p35 |
| 1 | v22949 | HetFc-p35 | HetFc-p35 | p40 |
| 1 | v22951 | HetFc-L1^{a}-p40-L2- | HetFc | NA |
| | | p35 | | |
| 1 | v23086 | HetFc-L-p40 | HetFc | p35 |
| 1 | v23087 | HetFc-L1-p40 | HetFc-L2-p40 | p35 |
| | v23046 | HetFc-p19 | HetFc | p40 |
| | v23048 | p19-L-HetFc | HetFc | p40 |
| | v23051 | p40-L-HetFc | HetFc | p19 |
| | v23088 | HetFc-L-p40 | HetFc | p19 |
| | v23091 | HetFc-L1-p40-L2-p19 | HetFc | NA |
| 5 | v24013 | HetFc-PCL1- | HetFc-L2-p40-L3- | NA |
| | | IL12Rβ2₂₄₋₃₂₁ | p35 | |
| 5 | v24019 | HetFc | HetFc-L1-p40-L2- | NA |
| | | | p35-PCL3- | |
| | | | IL12Rβ2₂₄₋₁₂₄ | |
| 5 | v29243 | HetFc-L1-p40-L2- | HetFc | NA |
| | | p35-PCL3-Briak_{VL}- | | |
| | | L4-Briak_{VH} | | |
| 5 | v29244 | HetFc-PCL1-Briak_{VL}- | HetFc-L3-p40-L4- | NA |
| | | L2-Briak_{VH} | p35 | |
| 5 | v31277 | HetFc-PCL1-Briak_{VH}- | HetFc-L3-p40-L4- | NA |
| | | PCL2-Briak_{VL} | p35_{ΔR} | |
| 5 | v32041 | HetFc-L1-Briak_{VH}-L2- | HetFc-L3-p40-L4- | NA |
| | | Briak_{VL} | p35_{ΔR} | |
| 5 | v32044 | HetFc-L1-IL12Rβ2₂₄₋₃₂₁ | HetFc-L2-p40-L3- | NA |
| | | | p35_{ΔR} | |
| 5 | v32045 | HetFc-PCL1- | HetFc-L2-p40-L3- | NA |
| | | IL12Rβ2₂₄₋₃₂₁ | p35_{ΔR} | |
| 5 | v32453 | HetFc-L1-Briak_{VH}-L2- | HetFc-PCL3-p40-L4- | NA |
| | | Briak_{VL} | p35_{ΔR} | |
| 5 | v32455 | HetFc-L1-IL12Rβ2₂₄₋₃₂₁ | HetFc-PCL2-p40-L3- | NA |
| | | | p35_{ΔR} | |
| 6 | v24015 | HetFc-PCL- | HetFc-p35 | p40 |
| | | IL12Rβ2₂₄₋₃₂₁ | | |
| 6 | v29232 | HetFc-p35-PCL1- | HetFc | p40 |
| | | Briak_{VL}-L2-Briak_{VH} | | |
| 6 | v29257 | HetFc-p35 | HetFc | Briak_{VH}-L1-Briak_{VL}- |
| | | | | PCL2-p40 |
| 6 | v29231 | HetFc-p35 | HetFc | p40-PCL1-Briak_{VL}- |
| | | | | L2-Briak_{VH} |
| 6 | v29233 | HetFc-PCL1-Briak_{VL}- | HetFc-p35 | p40 |
| | | L2-Briak_{VH} | | |
| 7 | v24017 | IL12Rβ2₂₄₋₃₂₁-PCL1- | p35-L2-HetFc | p40 |
| | | HetFc | | |
| 7 | v24018 | IL12Rβ2₂₄₋₁₂₄-PCL1- | HetFc | p40 |
| | | p35-L2-HetFc | | |
| 7 | v29240 | p35-L1-HetFc | HetFc | p40-PCL2-Briak_{VL}- |
| | | | | L3-Briak_{VH} |
| 7 | v29259 | p35-L1-HetFc | HetFc | Briak_{VH}-L2-Briak_{VL}- |
| | | | | PCL3-p40 |
| 7 | v29278 | Briak_{VH}-L1-Briak_{VL}- | p35-L3-HetFc | p40 |
| | | PCL2-HetFc | | |
| 7 | v29279 | Briak_{VH}-L1-Briak_{VL}- | HetFc | p40 |
| | | PCL2-p35-L3-HetFc | | |
| 8 | v24016 | IL12Rβ2₂₄₋₃₂₁-PCL1- | p40-L2-HetFc | p35 |
| | | HetFc | | |
| 8 | v29234 | Briak_{VH}-L1-Briak_{VL}- | HetFc | p35 |
| | | PCL2-p40-L3-HetFc | | |
| 8 | v29235 | p40-L1-HetFc | HetFc | p35-PCL2-Briak_{VL}- |
| | | | | L3-Briak_{VH} |
| 8 | v29258 | p40-L1-HetFc | HetFc | Briak_{VH}-L2-Briak_{VL}- |
| | | | | PCL3-p35 |
| 8 | v29277 | Briak_{VH}-L1-Briak_{VL}- | p40-L3-HetFc | p35 |
| | | PCL2-HetFc | | |
| 9 | v24014 | HetFc-PCL1- | HetFc-L2-p40 | p35 |
| | | IL12Rβ2₂₄₋₃₂₁ | | |
| 9 | v29237 | HetFc-PCL1-Briak_{VL}- | HetFc-L3-p40 | p35 |
| | | L2-Briak_{VH} | | |
| 9 | v29238 | HetFc-L1-p40-PCL2- | HetFc | p35 |
| | | Briak_{VL}-L3-Briak_{VH} | | |
| 9 | v29239 | HetFc-L1-p40 | HetFc | p35-PCL2-Briak_{VL}- |
| | | | | L3-Briak_{VH} |
| 21 | v32867 | HetFc-PCL1-Briak_{VH}- | HetFc-L3-p40-L4- | NA |
| | | PCL2-Briak_{VL} | p35_{ΔR}-PCL5-h6F6_{VL}- | |
| | | | L6-h6F6_{VH} | |
| 21 | v32868 | HetFc-PCL1-Briak_{VH}- | HetFc-L5-p40-L6- | NA |
| | | PCL2-Briak_{VL}-PCL3- | p35_{ΔR} | |
| | | h6F6_{VL}-L4-h6F6_{VH} | | |
| 21 | v32869 | HetFc-PCL1-Briak_{VH}- | HetFc-L5-p40-L6- | NA |
| | | PCL2-Briak_{VL}-PCL3- | p35_{ΔR} | |
| | | h6F6_{VH}-L4-h6F6_{VL} | | |
| 21 | v32870 | HetFc-PCL1- | HetFc-L2-p40-L3- | NA |
| | | IL12Rβ1₂₄₋₂₄₀ | p35_{ΔR}-PCL4- | |
| | | | IL12Rβ2₂₄₋₃₂₁ | |
| 21 | v32871 | HetFc-PCL1- | HetFc-L3-p40-L4- | NA |
| | | IL12Rβ2₂₄₋₁₂₄-PCL2- | p35_{ΔR} | |
| | | IL12Rβ1₂₄₋₂₄₀ | | |
| 21 | v32873 | IL12Rβ2₂₄₋₁₂₄-PCL1- | IL12Rβ1₂₄₋₂₄₀-PCL3- | p40 |
| | | p35-L2-HetFc | HetFc | |
| 21 | v32895 | HetFc-PCL1- | HetFc-PCL2- | p40 |
| | | IL12Rβ1₂₄₋₂₄₀ | IL12RB2₂₄₋₁₂₄-PCL3- | |
| | | | p35 | |
| | Pv1^{b} | HetFc-PCL1-Briak_{VH}- | HetFc-PCL3-p40-L4- | NA |
| | | PCL2-Briak_{VL} | p35_{ΔR} | |
| 32 | v32862^{c} | HetFc-PCL1-Briak_{VH}- | HetFc-L3-p40-L4- | NA |
| | | L2-Briak_{VL} | p35_{ΔR} | |
| 32 | v35425 | HetFc-PCL1-Briak_{VH}- | HetFc-L3-p40-L4- | NA |
| | | L2-Briak_{VL} | P35_{ΔR}(F39S_Y40S_Y167S) | |
| 32 | v35456 | HetFc-PCL1-Briak_{VH}- | HetFc-L3-p40-L4- | NA |
| | | L2-Briak_{VL} | p35_{ΔR}-PCL5-h6F6_{VL}- | |
| | | | L6-h6F6_{VH} | |
| 32 | v36190 | HetFc-PCL1-Briak_{VH}- | HetFc-L3- | NA |
| | | L2-Briak_{VL} | p40(D41S_E45R_K58S_E59S_K195D)- | |
| | | | L4-p35_{ΔR} | |
| 32 | v35436 | HetFc-L1-Briak_{VH}-L2- | HetFc-L3-p40-L4- | NA |
| | | Briak_{VL} | p35_{ΔR} | |
| 32 | v35437 | HetFc-L1-Briak_{VH}-L2- | HetFc-L3-p40-L4- | NA |
| | | Briak_{VL} | p35_{ΔR}(F39S_Y40S_Y167S) | |
| 32 | v35457 | HetFc-L1-Briak_{VH}-L2- | HetFc-L3-p40-L4- | NA |
| | | Briak_{VL} | p35_{ΔR}-L5-h6F6_{VL}- | |
| | | | L6-h6F6_{VH} | |
| 32 | v36193 | HetFc-L1-Briak_{VH}-L2- | HetFc-L3- | NA |
| | | Briak_{VL} | p40(D41S_E45R_K58S_E59S_K195D)- | |
| | | | L4-p35_{ΔR} | |
| 32 | v33507 | HetFc-PCL1-Briak_{VH}- | HetFc-L3-p40-L4- | NA |
| | | PCL2-Briak_{VL} | P35_{ΔR}(F39S_Y40S_Y167S) | |
| 32 | v33510 | HetFc-PCL1-Briak_{VH}- | HetFc-L3- | NA |
| | | PCL2-Briak_{VL} | p40(D41S_E45R_K58S_E59S_K195D)- | |
| | | | L4-p35_{ΔR} | |

^{a}The numbering of the linkers (L, PCL) is for clarity only and the numbers are interchangeable. Any given L or PCL may have a different number depending on the configuration or geometry.
^{b}Identical to v31277 (FIG. 5) but adding the cleavable linker from v32453.
^{c}v32862 is identical to v31277 except that the linker between Briak_{VH} and Briak_{VL} is not protease cleavable.

[0077] One aspect of the present disclosure provides non-masked parental IL12 fusion proteins. Such non-masked parental IL12 fusion proteins contain the domains described above for the masked IL12 fusion proteins but lack the MM and in certain embodiments, the linker attaching the MM to the rest of the fusion protein. These non-masked parental IL12 fusion proteins have not been modified by a MM and in certain embodiments are used as comparator fusion proteins where appropriate.

[0078] In one embodiment, the masked IL12 fusion protein has the structural configuration Fc1-L1-MM/Fc2-L2-p40-L3-p35 (see e.g., FIG. 5, variant 31277; where Fc1 is connected to Fc2 by a disulfide bond) wherein at least one of L1, L2, or L3 is a protease cleavable linker. In one embodiment, L1 is a protease cleavable linker. In a further embodiment, the MM further comprises a fourth linker. In this regard, in certain embodiments and as noted elsewhere herein, the MM may be an scFv having the structure configuration VH-L-VL or VL-L-VH and in certain embodiments, the linker between the VH and VL is optionally a protease cleavable linker (see e.g., FIG. 32, variant 32862).

[0079] It should be noted that the numbering of the linkers is for clarity only and the numbers are interchangeable. Any given linker may have a different number depending on the configuration or geometry. L1 in one geometry is not necessarily the same linker as L1 in a different geometry. In some configurations, L1 may be a protease cleavable linker and in other configurations, L1 is not a protease cleavable linker. Moreover, similar geometries may number the linkers differently.

[0080] As used herein the “IL12 containing polypeptide” or the “released IL12 polypeptide” refers to the polypeptide comprising an IL12 polypeptide that is released from the masked IL12 fusion protein after cleavage of the protease cleavable linker. This is to distinguish from a wild type IL12 or the IL12 polypeptide included in the masked fusion proteins herein (“an IL12 polypeptide” as recited in the claims). In certain embodiments, the released IL12 polypeptide is the same as the IL12 polypeptide. In other embodiments, the released IL12 polypeptide may contain amino acid sequences that correspond to portions of the protease cleavable linker and may also contain an Fc polypeptide. As a non-limiting example, in one embodiment, the masked IL12 fusion protein has the structural configuration Fc1-L1-MM/Fc2-L2-p40-L3-p35 (see e.g., v31277 or v32455 in FIG. 5; where Fc1 is connected to Fc2 by one or more disulfide bonds) wherein at least one of L1, L2, or L3 is a protease cleavable linker. In this setting, where L1 is a protease cleavable linker, the released IL12 polypeptide (released after cleavage of the protease cleavable linker) has the following structural configuration: Fc1-L1′/Fc2-L2-p40-L3-p35, where L1′ is the portion of the protease cleavable linker that remains after protease cleavage and Fc1 is connected to Fc2 by one or more disulfide bonds. As another example, using the same structural configuration shown above, where L2 is a protease cleavable linker (or L2 and L1 are both protease cleavable linkers), the released IL12 polypeptide has the following structural configuration: L2′-p40-L3-p35 where L2′ is the portion of the protease cleavable linker that remains after protease cleavage. In this example, the released IL12 polypeptide is no longer fused to an Fc. As noted elsewhere herein, the released IL12 polypeptide demonstrates recovered IL12 binding/activity as compared to the masked IL12 fusion protein.

[0081] Cleavage can be assessed by LabChip™ CE-SDS analysis. In one illustrative assay, masked IL12 HetFc fusion proteins are incubated for about 10 to about 24 hours with matriptase (R&D Systems) at a molar ratio of 1:50 (Matriptase:Protein) in buffer at a neutral pH at 37° C. Non-reducing and reducing LabChip™ CE-SDS analysis is carried out to assess the degree of digestion, and LC/MS is performed (see e.g., as described in the Examples and the Protocols described in the Examples) to identify the locations of cleavage. Recovery of IL12 activity or IL12 receptor complex binding following protease cleavage can be tested using SPR or cell based assays known in the art, such as those described herein (NK relative abundance, CD8+IFNγ release, CTLL-2 assays).

[0082] When the masked IL12 fusion protein is in the presence of the IL12 receptor complex but not sufficient enzyme or enzyme activity to cleave the protease cleavable linker, specific binding of the masked IL12 fusion protein to the IL12 receptor complex is reduced or inhibited, as compared to the IL12 polypeptide released after cleavage of the protease cleavable linker in the presence of the IL12 receptor and sufficient enzyme or enzyme activity to cleave the protease cleavable linker.

[0083] When the masked IL12 fusion protein is in the presence of the IL12 receptor complex but not sufficient enzyme or enzyme activity to cleave the protease cleavable linker, functional IL12 activity of the masked IL12 fusion protein is reduced or inhibited, as compared to the functional IL12 activity of the IL12 polypeptide released after cleavage of the protease cleavable linker in the presence of the IL12 receptor and sufficient enzyme or enzyme activity to cleave the protease cleavable linker.

[0084] By reduced or inhibited binding or activity it is meant that binding or functional IL12 activity is lower than the binding or functional IL12 activity of an appropriate control, such as wild type IL12, the released IL12 polypeptide or a corresponding unmasked parental fusion protein. The reduced or inhibited binding or activity can be expressed as reduced potency. In certain embodiments, the potency of a masked IL12 fusion protein in its masked state is reduced by about 2-fold to about 2500-fold as compared to the IL12 activity of an appropriate control, such as parental non-masked fusion proteins or the IL12 polypeptide released from the masked IL12 fusion protein after cleavage of the protease cleavable linker. The potency of a masked IL12 fusion protein as described herein is in certain embodiments reduced by about 5-fold to about 2000-fold, by about 10-fold to about 1500-fold, by about 15-fold to about 1000-fold, by about 20-fold to about 800-fold, by about 25-fold to about 600-fold, by about 25-fold to about 100-fold, by about 50-fold to about 100-fold, by about 50-fold to about 2000-fold, by about 100-fold to about 2000-fold, or by about 500-fold to about 2000-fold. In some embodiments, the potency of a masked IL12 fusion protein as described herein is reduced by about 100, 125, 150, 175, 200, 225, 250, 275, 300, 325, 350, 375, 400, 425, 450, 475, 500, 525, 550, 575, 600, 625, 650, 675, 700, 725, 750, 775, 800, 825, 850, 875, 900, 925, 950, 975, 1000, 1100, 1200, 1300, 1400, 1500, 1600, 1700, 1800, 1900, 2000, 2500, or 3000-fold. In certain embodiments, potency is reduced by more than 3500, 4000, 4500, 5000, 5500, 6000, 7000, 8000, 9000 or 10,000 fold.

[0085] When the masked IL12 fusion protein is in the presence of the IL12 receptor and sufficient enzyme or enzyme activity to cleave the protease cleavable linker (e.g., in the tumor microenvironment (TME) or other relevant in vivo location), the protease cleavable linker is cleaved and unmasks or releases a functional IL12 polypeptide, also referred to herein as the “released IL12 polypeptide”. Just as the specific binding and functional IL12 activity (potency) of the masked IL12 fusion protein is reduced or inhibited as compared to the IL12 polypeptide released after cleavage of the protease cleavable linker, the binding and functional IL12 activity of the released IL12 polypeptide released after cleavage of the protease cleavable linker is increased as compared to the masked IL12 fusion protein in its masked, uncleaved state.

[0086] Recovered IL12 activity or binding of the released IL12 polypeptide following protease cleavage can be determined as compared to wild type IL12, the uncleaved masked IL12 fusion protein (e.g., untreated with protease), parental non-masked IL12 fusion protein or other appropriate control. Thus, in certain embodiments, the released IL12 polypeptide has between 2-fold and 5000-fold activity or binding as compared to an appropriate control. The recovered IL12 activity can also be expressed as x-fold increased potency as compared to an appropriate control. In certain embodiments, the potency or activity of a released IL12 polypeptide is increased by about 10-fold to about 2500-fold as compared to the IL12 activity of an appropriate control, such as an uncleaved masked IL12 fusion protein. The potency of a released IL12 polypeptide as described herein is in certain embodiments increased by about 5-fold to about 2000-fold, by about 10-fold to about 1500-fold, by about 15-fold to about 1000-fold, by about 20-fold to about 800-fold, by about 25-fold to about 600-fold, by about 25-fold to about 100-fold, by about 50-fold to about 100-fold, by about 50-fold to about 2000-fold, by about 100-fold to about 2000-fold, or by about 500-fold to about 2000-fold as compared to an untreated uncleaved masked control fusion protein or other appropriate control. In some embodiments, the potency of a released IL12 polypeptide as described herein is about 100, 125, 150, 175, 200, 225, 250, 275, 300, 325, 350, 375, 400, 425, 450, 475, 500, 525, 550, 575, 600, 625, 650, 675, 700, 725, 750, 775, 800, 825, 850, 875, 900, 925, 950, 975, 1000, 1100, 1200, 1300, 1400, 1500, 1600, 1700, 1800, 1900, 2000, 2500, 3000, 3500, 4000, 4500, 5000, 5500, 6000, 6500, 7000, 7500, 8000, 9000, or 10,000-fold increased as compared to an untreated uncleaved masked control fusion protein or other appropriate control.

[0087] In certain embodiments, a masked IL12 fusion protein as described herein demonstrate a complete reduction in potency of the IL12 polypeptide in that IL12 activity is undetected by, e.g., an NK or other cell-based assay. In this case, the “fold reduction in potency” cannot be calculated as activity is below the limit of detection. The recovery of the IL12 activity of the released IL12 polypeptide can be expressed as within x-fold of a different comparator (see e.g., v32454, FIG. 17C).

[0088] Methods for measuring binding or functional IL12 activity are known in the art and described herein. In certain embodiments, binding activity can be measured using surface plasmon resonance (SPR). Functional IL12 activity can be measured, for example, in an NK cell relative abundance or CD8+ T cell IFNγ release assay (see e.g., Example 9).

[0089] Thus, in certain embodiments, provided herein are masked IL12 fusion proteins that exhibit, in the absence of protease, at least 5-fold, 10-fold, 15-fold, 20-fold, 30-fold, 40-fold, 50-fold, 100-fold, 200-fold, 300-fold, 400-fold, 500-fold, 600-fold, 700-fold, 800-fold, 900-fold, 1000-fold, 1200-fold, 1500-fold, 2000-fold, 2500-fold, 3000-fold, or further reduced binding activity, functional IL12 activity, or potency as compared to an appropriate control, as measured by SPR, NK cell, CD8+ T cell IFNγ release, or other appropriate assay.

### IL12 Family of Cytokines

[0090] The present disclosure provides masked IL12 fusion proteins. Interleukin 12 (IL12) was the first recognized member of a family of heterodimeric cytokines that includes IL12, IL23, IL27, IL35 and IL39. IL12 and IL23 are pro-inflammatory cytokines important for development of T helper 1 (Th-1) and T helper 17 (Th-17) T cell subsets, while IL27 and IL35 are potent inhibitory cytokines. IL39 is an important cytokine in regulating innate and/or adaptive immune response. IL12 can directly enhance the activity of effector CD4 and CD8 T cells as well as natural killer (NK) and NK T cells.

[0091] Interleukin-12 (IL12) is a heterodimeric molecule composed of an alpha chain (the p35 subunit) and a beta chain (the p40 subunit) covalently linked by a disulfide bridge to form the biologically active 70 kDa dimer. Exemplary amino acid sequences of p35 and p40 subunits of IL12 are provided in Table 24. See SEQ ID Nos: 23 and 22 and variants thereof, such as, variants of the p40 subunit comprising a modified heparin loop (amino acids 256-264 of SEQ ID NO:22). Exemplary polynucleotide sequences encoding p35 and p40 are provided in SEQ ID NOs:103 and 102, respectively, and variants thereof.

[0092] IL23 is a member of IL12 cytokine family and is also composed of two subunits: the p40 subunit that it shares with IL12 and p19. Exemplary polynucleotide and amino acid sequence of the p19 subunit of IL23 is provided in Table 24. See SEQ ID Nos: 32 and 112. The receptor for IL23 (IL23R) consists of an IL23Ra subunit in complex with an IL12R1 subunit, which is a common subunit for the IL12 receptor and interacts with Tyrosine kinase 2 (Tyk2). The IL23R is mainly expressed on immune cells, in particular T cells (e.g., Th17 and gamma delta T cells), macrophages, dendritic cells and NK cells (Duvallet et ah, 2011). It has been recently shown that non-activated neutrophils express a basal amount of IL23R and that IL23R expression is increased upon cell activation (Chen et al., 2016).

[0093] The term “a protein having the function of IL12” or “a protein having the function of IL23” encompasses mutants of a wild type IL12 or IL23 sequence, respectively, wherein the wild type sequence has been altered by one or more of addition, deletion, or substitution of amino acids. IL12 and IL23 sequences contemplated herein include IL12 and IL23 sequences from any animal, in particular any mammal, including human, mouse, dog, cat, pig, and non-human primate.

[0094] The bioactivities of IL12 are well known and include, without limitation, differentiation of naive T cells into Th1 cells, stimulation of the growth and function of T cells, production of interferon-gamma (IFN-gamma) and tumor necrosis factor-alpha (TNF-α) from T and natural killer (NK) cells, reduction of IL4 mediated suppression of IFN-gamma, enhancement of the cytotoxic activity of NK cells and CD8⁺ cytotoxic T lymphocytes, stimulation of the expression of IL12Rβ1 and IL12Rβ2, facilitation of the presentation of tumor antigens through the upregulation of MHC I and II molecules, and anti-angiogenic activity. IL12 is produced primarily by antigen-presenting cells and drives cell-mediated immunity by binding to a two-chain receptor complex that is expressed on the surface of T cells or natural killer (NK) cells. The IL12 receptor beta-1 (IL12Rβ1) chain binds to the p40 subunit of IL12. IL12p35 ligation of the second receptor chain, IL12Rβ2, confers intracellular signaling (e.g. STAT4 phosphorylation) and activation of the receptor-bearing cell (Presky et al, 1996). Studies show equal cell-based affinity of IL12 for Rβ1 and Rβ2 individually, and higher affinity for the complex (J Immunol. 1998 Mar. 1; 160(5):2174-9). IL12 also acts on dendritic cells (DC), leading to increased maturation and antigen presentation, which can allow for the initiation of a T cell response to tumor specific antigens. It also drives the secretion of IL12 by DCs, creating a positive feedback mechanism to amplify the response.

[0095] Exemplary nucleic acid and amino acid sequences for the IL12, IL23 and the masked fusion proteins described herein are provided in Tables 24.

[0096] Variants of any of the nucleic acid and amino acid sequences provided herein are also contemplated for use in the masked fusion proteins as described herein in the section entitled “Polypeptides and Polynucleotides”. In certain embodiments, the IL12 fusion protein polypeptides described herein comprise a p35 amino acid sequence as set forth in SEQ ID NO: 23. In certain embodiments, the IL12 fusion proteins described herein comprise a p40 amino acid sequence as set forth in SEQ ID NO: 22. In another embodiment, the IL12 fusion polypeptides described herein comprise a p35 amino acid sequence as set forth in SEQ ID NO: 23 and a p40 amino acid sequence as set forth in SEQ ID NO: 22. In one embodiment, the IL12 fusion proteins described herein comprise a scIL12 having the configuration p35-L-p40 or p40-L-p35. In other embodiments, the IL12 polypeptides described herein may comprise a variant of the p35 and/or p40 sequence. In this regard, the variant may comprise a variant of the nucleic acid sequence encoding the p35 or p40 amino acid sequence where the variant encodes a protein that retains IL12 functional activity as compared to the wild type IL12, or other appropriate control. A variant nucleic acid sequence may comprise at least 50%, 55%, 60%, 65%, 70%, 75%, 80%, 85%, 86%, 87%, 88%, 89%, 90%, 91%, 92%, 93%, 94%, 95%, 96%, 97%, 98%, 99%, or higher % identity to the polynucleotide sequence encoding p35 and/or p40, such as the polynucleotide sequences set forth in SEQ ID Nos: 103 and 102. Illustrative variants of the IL12 polynucleotides include codon optimized polynucleotide sequences.

[0097] In certain embodiments, a variant may comprise a variant p35 and/or p40 polypeptide comprising at least 50%, 55%, 60%, 65%, 70%, 75%, 80%, 85%, 86%, 87%, 88%, 89%, 90%, 91%, 92%, 93%, 94%, 95%, 96%, 97%, 98%, 99%, or higher % identity to the amino acid sequence of IL12 p35 and/or p40 as set forth in SEQ ID Nos: 23 and 22, respectively, where such variant polypeptides retain IL12 functional activity as compared to an appropriate comparator molecule comprising a wild type IL12.

[0098] In other embodiments, the IL23 polypeptides described herein may comprise a variant of the p19 and/or p40 sequence. In this regard, the variant may comprise a variant of the nucleic acid sequence encoding the p19 or p40 amino acid sequence, where the variant encodes a protein that retains IL23 functional activity as compared to the wild type IL23. A variant nucleic acid sequence may comprise at least 50%, 55%, 60%, 65%, 70%, 75%, 80%, 85%, 86%, 87%, 88%, 89%, 90%, 91%, 92%, 93%, 94%, 95%, 96%, 97%, 98%, 99%, or higher % identity to the polynucleotide sequence encoding p19 and/or p40 as set forth in SEQ ID Nos: 112 and 102, respectively. Illustrative variants of the IL23 polynucleotides include codon optimized polynucleotide sequences.

[0099] In certain embodiments, a variant may comprise a variant p19 and/or p40 polypeptide comprising at least 50%, 55%, 60%, 65%, 70%, 75%, 80%, 85%, 86%, 87%, 88%, 89%, 90%, 91%, 92%, 93%, 94%, 95%, 96%, 97%, 98%, 99%, or higher % identity to the amino acid sequence of IL23 p19 and/or p40 as set forth in SEQ ID NOs: 32 and 22, respectively, where such variant polypeptides retain IL23 functional activity as compared to the wild type IL23.

[0100] In certain embodiments, the IL12 protein described herein has been modified to reduce heparin binding and or to be resistant to proteolytic cleavage. In this regard, the IL12 protein is modified to reduce heparin binding and/or be more resistant to proteolytic cleavage as compared to an unmodified IL12 protein. In certain embodiments, modifications are made to the IL12 protein to lower the binding affinity to heparin. In certain embodiments, modifications are made that both lower the binding affinity to heparin and result in resistance to proteolytic cleavage as compared to unmodified IL12 protein. In one embodiment, the modification to confer increased resistance to proteolytic cleavage or reduced binding to heparin is made to the p40 subunit. Illustrative modifications are described in Example 10 and 11 and are provided in Table 12. In another embodiment, the modification to confer increased resistance to proteolytic cleavage and/or reduced binding to heparin is made to the p35 subunit. In one embodiment, the N-terminal arginine of p35 is removed.

[0101] In certain embodiments assays for measuring increased resistance to proteolytic cleavage of the variants and fusion proteins described herein are known in the art and include the assays outlined in the Examples. As would be understood by one of skill in the art, assays may be modified and optimized as needed for a particular enzyme or protein to be cleaved. In one embodiment, the assay comprises incubating test proteins for a period of time with a protease at an appropriate ratio at a given pH and temperature. Non-reducing and reducing LabChip™ CE-SDS analysis is carried out to assess the degree of digestion, and LC/MS is performed to identify the locations of cleavage. In one embodiment, the assay is generally as follows: test proteins are incubated for 18 hours with protease (e.g., Matriptase (R&D Systems)) at an appropriate molar ratio, e.g., at a molar ratio of 1:50 (Matriptase:Protein) in a total reaction volume of 25 μL PBS-T pH 7.4 at 37° C. Non-reducing and reducing LabChip™ CE-SDS analysis is carried out to assess the degree of digestion, and LC/MS is performed to identify the locations of cleavage. In certain embodiments, the variants described herein demonstrate at least a 1%, 2%, 3%, 4%, 5%, 6%, 7%, 8%, 9%, 10% increase in resistance in protease cleavage (or a corresponding decrease in cleavage) as compared to wild type or comparator IL12 or IL23 polypeptides, or masked fusion proteins comprising such proteins, while retaining IL12 or IL23 functional activity. In certain embodiments, variants display up to complete resistance to protease cleavage to 24 hours contact with protease. In other embodiments, variants display up to complete resistance to protease cleavage after 1 hour-36 hours contact with protease. In another embodiment, a variant displays up to complete resistance to protease cleavage after 0.5, 1, 2, 3, 4, 5, 6, 7, 8, 9, 10, 12, 20, 24, 36, 48, or 72 hours contact with protease.

[0102] The variant cytokine polypeptides or fusion proteins comprising them as described herein, exhibit functional activity that is within 2 to 20-fold of the functional activity (e.g., IL12 or IL23) of an appropriate control, e.g., a relevant comparator fusion protein comprising a wild type cytokine (e.g., IL12 or IL23). In certain embodiments, cytokine variant polypeptides demonstrate equivalent potency as compared to wild type controls, e.g., as measured by relative abundance of NK cells, IFNγ release by CD8+ T cells, or cell signaling following receptor engagement. In other embodiments, cytokine variant polypeptides demonstrate a maximum attenuation of potency of between about 2-fold and about 20-fold. In certain embodiments, cytokine variant polypeptides or fusion proteins comprising them demonstrate attenuation of potency of between about 2-fold, 3, 4, 5, 6, 7, 8, 9, 10, 11, 12, 13, 14, 15, 16, 17, 18, 19 or about 20-fold. As noted elsewhere, IL12 is highly toxic. Accordingly, it may be desirable in certain embodiments to use a variant IL12 polypeptide having reduced potency. In certain embodiments, a variant may exhibit increased functional activity or increased potency as compared to the control, e.g., between about 2-fold and about 100-fold, or about 2-fold, 3-fold, 4-fold, 5-fold, 10-fold, 15-fold, 20-fold, 30-fold, 40-fold, 50-fold, 60-fold, 70-fold, 80-fold, 90-old, or 100-fold increased activity or potency as compared to an appropriate control. Cytokine functional activity can be measured using assays known in the art and described herein such as an NK or CTLL-2 assay or IFNγ release by CD8+ T cells.

[0103] Methods of measuring the functional activity of IL12 family cytokines are known in the art. Such methods include assays known in the art, such as assays to determine cell responsiveness to IL12 or IL23, measuring cytokine production in response to incubating appropriate cells with IL12 or IL23, measuring receptor binding and signaling activation.

[0104] In certain embodiments, IL12 activity is determined by measuring cell proliferation of cells or cell lines that are sensitive to IL12. Illustrative cells that can be used to test IL12 activity include CTLL-2 or NK cells. Such proliferation assays include assays as described, for example, by Khatri A, et al. 2007. J Immunol Methods 326(1-2):41-53; Puskas J, et al. 2011. Immunology 133(2):206-220; Hodge DL., et al. J Immunol. 2002 Jun. 15; 168(12):6090-8. Assays known in the art can be modified as desired to fit the particular cytokine being tested, such as IL12 or IL23.

[0105] In brief, a CTLL-2 assay for measuring IL12 functional activity may comprise serially diluting the recombinant proteins to be tested (e.g., a masked fusion protein as described herein) 1:5 in 50 μL of medium, then 4×10⁴ CTLL-2 cells in 100 μL of medium are added per well to a 96-well plate and incubated at 37° C. in 5% CO₂ for 18-22 h. At the end of this period, 75 μg/well of Thiazolyl Blue Tetrazolium Bromide (MTT; Sigma-Aldrich) is added and the plate is incubated for 8 h at 37° C. in 5% CO₂. Cells are lysed with 100 μL/well of 10% SDS (Gibco) acidified with HCl, incubated at 37° C. in 5% CO₂ overnight, and absorbance is read at 570 nm. Such an assay can be run on masked fusion proteins that have and have not been incubated with an appropriate protease. Thus, such assays can be used to test the masked fusion proteins described herein in the presence and absence of an appropriate protease which cleaves the protease cleavable linker and releases the mask thereby unblocking or unmasking the IL12.

[0106] In brief, an NK assay for measuring IL12 function activity can be carried out as follows: NK cells are cultured in growth medium without IL2 (assay media) for 12 hours, harvested and spun down to pellet cells. Cells are resuspended in assay media to 400 million cells/mL and 10,000 cells or 25 uL per well are added to assay plates. Variant test samples are titrated in triplicate at 1:5 dilution in 25 ul directly in 384-well black flat bottom assay plates. Recombinant cytokine (e.g., human IL12 (Peprotech, Rocky Hill, N.J.)) is included as a positive control. Plates are incubated for 3 days at 37° C. and 5% carbon dioxide. Post incubation, 25 uL/well of supernatant is transferred to non-binding 384-well plates (Greiner-Bio-One, Kremsmünster, Austria) and stored at −80° C. After supernatant removal, CellTiter-Glo® Luminescent Cell Viability reagent (Promega, Madison, Wis.) or equivalent reagent is added to plates at 25 uL/well and plates are incubated at room temperature away from light for 30 minutes. Following incubation, plate luminescence is scanned, such as on a BioTek synergy H1 plate reader (BioTek, Winooski, Vt.).

[0107] In one embodiment, IL12 activity can be determined by measuring cell signaling cascades triggered by IL12 interaction with its receptor (e.g., IL12Rβ2 and IL12Rβ1 interaction with IL12 p35-p40 heterodimers). In one embodiment, IL12 activity is determined by measuring STAT4 signaling activity using assays known in the art and commercially available for example, from Abeomics, San Diego, Calif. USA.

### Masking Moieties

[0108] The masked IL12 or IL23 fusion proteins described herein comprise a masking moiety (MM) that blocks or reduces the binding of IL12 or IL23 to its native receptor(s) and/or blocks or reduces its functional activity. In certain embodiments, the MM specifically binds to the IL12. “Specifically binds”, “specific binding” or “selective binding” means that the binding is selective for the desired antigen (in the case of the present disclosure, the MM specifically binds IL12 or IL23) and can be discriminated from unwanted or non-specific interactions. The ability of a MM to bind to and block or reduce IL12/IL23 activity can be measured either through an enzyme-linked immunosorbent assay (ELISA) or other techniques familiar to one of skill in the art, e.g. surface plasmon resonance (SPR) technique (analyzed on a BIAcore instrument) (Liljeblad et al., Glyco J 17, 323-329 (2000)), and traditional binding assays (Heeley, Endocr Res 28, 217-229 (2002)). In one embodiment, the extent of binding of a MM to an unrelated protein is less than about 10% of the binding of the MM to IL12/IL23 as measured, e.g., by SPR. In certain embodiments, MM that binds to IL12/IL23 or a biologically active fragment thereof, has a dissociation constant (K_{d}) of <1 μM, <100 nM, <10 nM, <1 nM, <0.1 nM, <0.01 nM, or <0.001 nM (e.g. 10⁻⁸ M or less, e.g. from 10⁻⁸M to 10⁻¹³ M, e.g., from 10⁻⁹M to 10⁻¹³ M).

[0109] The MM of the present disclosure generally refers to an amino acid sequence present in the masked cytokine fusion protein and positioned such that it reduces the ability of the cytokine, within the context of the masked cytokine fusion protein, to specifically bind its target and/or to function. In some cases, the MM is coupled to the masked cytokine fusion protein by way of a linker and in certain embodiments, the linker is a protease cleavable linker.

[0110] In certain embodiments, the masked cytokine fusion protein comprises only non-cleavable linkers. In this regard, the MM results in the masked cytokine fusion molecule having reduced effective affinity for its target receptor, thereby reducing its toxicity. In other embodiments, as described further herein, the masked cytokine fusion protein comprises at least one protease cleavable linker.

[0111] When an IL12 fusion protein described herein comprises a MM and is in the presence of the target (e.g., an IL12 receptor), specific binding of the masked IL12 fusion protein to the IL12 receptor is reduced or inhibited as compared to specific binding of the non-masked parental IL12 fusion protein or the released IL12 polypeptide. As one non-limiting example and as noted elsewhere, in certain embodiments, the masked IL12 fusion protein is in the structural configuration Fc1-L1-MM/Fc2-L2-p40-L3-p35 (see e.g., FIG. 5) wherein at least one of L1, L2, or L3 is a protease cleavable linker. In this setting, where L1 is a cleavable linker, the specific binding of IL12 to its receptor is reduced or inhibited in the uncleaved fusion protein as compared to the specific binding of the fusion protein comprising IL12 after cleavage of L1 by the protease (e.g., as compared to the fusion protein Fc1-L1′/Fc2-L2-p40-L3-p35). Similarly, the specific binding of masked (activatable) IL12 fusion protein to its receptor is reduced or inhibited as compared to the non-masked parent IL12 fusion protein (e.g., Fc1/Fc2-L2-p40-L3-p35 (see e.g., FIG. 1)).

[0112] When an IL12 fusion protein described herein comprises a MM and is in the presence of the target (e.g., an IL12 receptor), the potency of the masked IL12 fusion protein is reduced or inhibited as compared to the non-masked parental IL12 fusion protein or the released IL12 polypeptide. Thus, the MM functions to block functional activity of the IL12. As one non-limiting example and as noted elsewhere, in certain embodiments, the masked IL12 fusion protein is in the structural configuration Fc1-L1-MM/Fc2-L2-p40-L3-p35 (see e.g., FIG. 5) wherein at least one of L1, L2, or L3 is a protease cleavable linker. In this setting, where L1 is a cleavable linker, the functional activity or potency of IL12 is reduced when in the uncleaved fusion protein as compared to the potency of the released IL12 after cleavage of L1 by the protease (e.g., as compared to the fusion protein Fc1-L1′/Fc2-L2-p40-L3-p35). Similarly, the potency of the masked (activatable)

[0113] IL12 fusion protein is reduced or inhibited as compared to the non-masked parent IL12 fusion protein (e.g., Fc1/Fc2-L2-p40-L3-p35 (see e.g., FIG. 1, FIG. 5)). The reduction of potency of the masked fusion proteins and recovery of cytokine activity after cleavage is described elsewhere herein (see e.g., section above entitled Masked IL12/Protease Activatable IL12 Fusion Proteins).

[0114] In certain embodiments, the dissociation constant (K_{d}) of the masked IL12 fusion proteins herein (masked or not) towards an IL12 receptor is generally greater than the K_{d} of the same IL12 fusion protein that does not contain a MM. Conversely, the binding affinity of the masked IL12 fusion proteins towards an IL12 receptor is generally lower than the binding affinity of the IL12 fusion protein not modified with a MM.

[0115] In certain embodiments, the K_{d} of the MM towards the IL12 polypeptide is generally greater than the K_{d} of the IL12 polypeptide towards an IL12 receptor. Conversely, in certain embodiments, the binding affinity of the MM towards the IL12 polypeptide is generally lower than the binding affinity of the IL12 polypeptide towards an IL12 receptor.

[0116] It should be noted that due to proximity (that is, when the MM is fused by a linker to the IL12 fusion protein), the apparent “affinity” of the MM for the IL12 polypeptide is greater than when the MM is not fused to the IL12 fusion protein.

[0117] The MM can inhibit the binding of the masked IL12 fusion protein to the IL12 receptor and thereby inhibit the IL12 functional activity of the fusion protein as compared to the IL12 polypeptide not modified by the MM. The MM can bind to the IL12 polypeptide and inhibit it from binding to its receptor. The MM can sterically inhibit the binding of the masked IL12 fusion protein to the IL12 receptor. The MM can allosterically inhibit the binding of the masked IL12 fusion protein to the IL12 receptor. In those embodiments when the masked IL12 fusion protein is in the presence of the IL12 receptor, there is no binding or substantially no binding of the masked IL12 fusion protein to the IL12 receptor, or no more than 0.001 percent, 0.01 percent, 0.1 percent, 1 percent, 2 percent, 3 percent, 4 percent, 5 percent, 6 percent, 7 percent, 8 percent, 9 percent, 10 percent, 15 percent, 20 percent, 25 percent, 30 percent, 35 percent, 40 percent, or 50 percent binding of the masked IL12 fusion protein to the target, as compared to the binding of the unmasked IL12 fusion protein, the binding of the parental IL12, for at least 2, 4, 6, 8, 12, 28, 24, 30, 36, 48, 60, 72, 84, 96 hours, or 5, 10, 15, 30, 45, 60, 90, 120, 150, 180 days, or 1, 2, 3, 4, 5, 6, 7, 8, 9, 10, 11, 12 months or greater when measured in vivo or by Surface Plasmon Resonance (SPR) (see Protocol 12 in the Example section).

[0118] In certain embodiments the MM is not a natural binding partner of the IL12 polypeptide. The MM may be a modified binding partner for the IL12 polypeptide which contains amino acid changes that at least slightly decrease affinity and/or avidity of binding to the IL12 polypeptide. In some embodiments the MM contains no or substantially no homology to the IL12 receptor. In other embodiments the MM is no more than 5 percent, 10 percent, 15 percent, 20 percent, 25 percent, 30 percent, 35 percent, 40 percent, 45 percent, 50 percent, 55 percent, 60 percent, 65 percent, 70 percent, 75 percent, or 80 percent similar to an IL12 receptor.

[0119] When the IL12 fusion protein is in a ‘masked’ state, even in the presence of the IL12 receptor, the MM interferes with or inhibits the binding of the masked IL12 fusion protein to the receptor. However, in certain embodiments, in the unmasked or cleaved state of the IL12 fusion protein, the MM's interference with target binding to the IL12 receptor is reduced, thereby allowing greater access of the released IL12 polypeptide to its receptor and providing for receptor binding.

[0120] For example, when the masked cytokine fusion protein comprises a protease cleavable linker (PCL, see elsewhere herein), the masked cytokine fusion protein can be unmasked upon cleavage of the PCL, in the presence of enzyme, preferably a disease-specific enzyme. Thus, the MM is one that when the masked cytokine fusion protein is uncleaved provides for masking of the cytokine from target binding, but does not substantially or significantly interfere or compete for binding of the cytokine receptor to the released cytokine polypeptide (released when the masked cytokine fusion protein is cleaved). Thus, the combination of the MM and the PCL facilitates the switchable/activatable phenotype, with the MM reducing binding of the cytokine to its receptor when it is in the uncleaved state, and cleavage of the PCL by protease providing for increased binding of target and recovery of the cytokine activity.

[0121] The structural properties of the MM will vary according to a variety of factors such as the minimum amino acid sequence required for interference with cytokine binding and/or activity, the cytokine-cytokine receptor protein binding pair of interest, the size of the cytokine and the fusion protein, the length of the PCL, whether the PCL is positioned within the MM, between the Fc and the cytokine, between the Fc and mask, the presence or absence of additional linkers, etc.

[0122] The MM can be provided in a variety of different forms. In certain embodiments, the MM can be selected to be a known binding partner of the cytokine. In certain embodiments, the MM is one that masks the cytokine from target binding when the masked cytokine fusion protein is uncleaved but does not substantially or significantly interfere or compete for binding of the target with the cytokine polypeptide that is released after cleavage. In a specific embodiment, the MM do not contain the amino acid sequences of a naturally-occurring binding partner of the cytokine.

[0123] The efficiency of the MM to inhibit the binding or activity of the cytokine when coupled can be measured by SPR or a cell based assay as described herein and outlined in detail elsewhere (see e.g., NK, CTLL-2 or CD8+ T cell IFNγ release assays) and as described herein in the Examples section of the disclosure. Masking efficiency of MMs can be determined by at least two parameters: affinity of the MM for the cytokine or a fusion protein comprising the cytokine and the spatial relationship of the MM relative to the binding interface of the cytokine to its receptor.

[0124] Regarding affinity, by way of example, a MM may have high affinity but only partially inhibit the binding of the cytokine to its receptor, while another MM may have a lower affinity for the cytokine but fully inhibit target binding. For short time periods, the lower affinity MM may show sufficient masking; in contrast, over time, that same MM may be displaced by the target (due to insufficient affinity for the cytokine).

[0125] In a similar fashion, two MA/Is with the same affinity may show different extents of masking based on how well they promote inhibition of the cytokine from binding its receptor. In another example, a MM with high affinity may bind and change the structure of the cytokine or a fusion protein comprising the cytokine so that binding to its target is completely inhibited while another MM with high affinity may only partially inhibit binding. As a consequence, discovery of an effective MM is generally not based only on affinity but can include a measure of the potency of the masked cytokine fusion protein as compared to an appropriate control. Likewise, the effectiveness of the cleavage of the PCL and release of the polypeptide comprising the cytokine can be determined by measuring recovery of cytokine activity post cleavage and is a factor in identifying an effective MM, PCL, and masked cytokine fusion protein configuration.

[0126] In certain embodiments, a masked cytokine fusion protein may comprise more than one MM (see e.g., FIG. 21, Table 15). In this regard, each MM may be derived from an antibody or antigen-binding fragment thereof or may be derived from a cytokine receptor (e.g., an IL12R) or there may be a combination of MMs derived from antibodies and MMs derived from receptors, or synthetic polypeptide MMs. In one embodiment, a masked cytokine fusion protein herein comprises two MM. In another embodiment, a masked cytokine fusion protein herein comprises two MM wherein one MM is fused via a PCL. In another embodiment, the cytokine fusion protein herein comprises two MM wherein both MMs are fused via a PCL. In one embodiment, one or both MM comprises an additional PCL (e.g., an scFv comprising a PCL between the VH and VL).

[0127] The MM may be a single-chain Fv (scFv) antibody fragment, an IL12 receptor β2 subunit (IL12Rβ2) or an IL12-binding fragment thereof, an IL12 receptor 131 subunit (IL12Rβ1) or an IL12-binding fragment thereof (e.g., an extracellular domain (ECD) of the IL12Rβ1), or an IL23R, or an IL23-binding fragment thereof. Illustrative scFv MM comprise the VH and VL amino acid sequences provided in SEQ ID NOs: 11-12 and 255-256, and variants thereof, for example as described in Table 8 (H_Y32A; H_F27V; H_Y52AV; H_R52E; H_R52E_Y52AV; H_H95D; H_G96T; H_H98A; mutations referenced according to Kabat numbering for Briakinumab VH provided in SEQ ID NO:11). In certain embodiments, illustrative MM comprise the VHCDR and VLCDR set forth in SEQ ID NOs:13-18 or the VHCDR and VLCDR set forth in SEQ ID NOs:257-262. In certain embodiments, the MM is an IL12 receptor or an IL12-binding fragment thereof, or variants thereof that retain the ability to block IL12 activity. In one embodiment, the MM is an ECD of human IL12Rβ2, or a variant thereof that blocks IL12 activity. In one particular embodiment, the MM comprises amino acids 24-321 of human IL12Rβ2 (see e.g., amino acids 24-321 of SEQ ID NO:253). In another embodiment, the MM comprises amino acids 24-124 of human Th12Rβ2 (see e.g., amino acids 24-124 of SEQ ID NO:253). In one embodiment, the MM comprises amino acids 24-240 of human IL12Rβ1 (see e.g., amino acids 24-240 of SEQ ID NO:252), or a variant thereof that blocks IL12 activity. In one embodiment, a MM comprises an IL23R ECD (e.g., amino acids 24-355 of SEQ ID NO:263; amino acids 14-318 of SEQ ID NO:263; or amino acids 24-126 of SEQ ID NO:263. See also SEQ ID NOs: 264-266), or a variant thereof that blocks IL23 activity.

[0128] Other illustrative MM are described herein and are set forth, for example, in the variants and clones described in the Tables, Examples and sequences provided herein.

### Antibodies and Antigen-Binding Fragments Thereof

[0129] In certain embodiments, the masking moieties used in the masked fusion proteins herein comprise an antibody or an antigen-binding fragment of an antibody. Antigen-binding fragments include but are not limited to variable or hypervariable regions of light and/or heavy chains of an antibody (V_{L}, V_{H}), variable fragments (Fv), Fab′ fragments, F(ab′) 2 fragments, Fab fragments, single chain antibodies (scAb), single chain variable regions (scFv), complementarity determining regions (CDR), domain antibodies (dAbs), single domain heavy chain immunoglobulins, single domain light chain immunoglobulins, or other polypeptides known in the art containing an antigen-binding fragment capable of binding target proteins or epitopes on target proteins.

[0130] Illustrative antigen-binding domains are derived from antibodies that bind IL12 and/or IL23.

[0131] In one embodiment, the MM comprises an antibody or antigen-binding fragment thereof, that specifically binds to IL12. In one embodiment, the MM comprises an antibody or antigen-binding fragment thereof, that specifically binds to IL23. In certain embodiments, the MM comprises an scFv that specifically binds IL12 or IL23.

[0132] In some embodiments the MM can be identified through screening antibodies or antigen binding fragments thereof that bind to IL12 or IL23. The candidate MM can be fused in a variety of configurations in a cytokine fusion protein (see for example FIGS. 1, 5-9 and 21 and the Examples herein) and screened for their ability to reduce cytokine binding, reduce IL12 potency and/or for recovery of cytokine activity after cleavage. Antibodies may be derived from antibodies known in the art that bind to IL12 and/or IL23. Such antibodies are known and available for example, from the literature or can be found in the TABS Therapeutic Antibody Database (see tabs(dot)craic(dot)com). Illustrative antibodies for use in the masked IL12 fusion proteins herein include Briakinumab (U.S. Pat. Nos. 6,914,128; 7,504,485; 8,168,760; 8,629,257; 9,035,030); ustekinumab (U.S. Pat. Nos. 6,902,734; 7,279,157; U8080247; U.S. Pat. Nos. 7,736,650; 8,420,081; 7,887,801; 8,361,474; 8,084,233; 9,676,848), AK101, PMA204 (see e.g., U.S. Pat. No. 8,563,697), 6F6 (see e.g., U.S. Pat. No. 8,563,697; Clarke A W et al., 2010 MAbs 2:539-49). The h6F6 antibody binds a different epitope on p40 than Briakinumab or Ustekinumab.

[0133] In one embodiment, the MM is derived from an antibody comprising an antigen binding domain that binds to human IL12 and human IL23. In another embodiment, the antibody binds human IL12p40 existing as a monomer (human IL12p40) and as a homodimer (human IL12p80) and the antibody inhibits the binding of human IL12 to human IL12Rβ2 and human IL23 to human IL23R but does not inhibit the binding of human IL12 or human IL23 or human IL12p40 or human IL12p80 to human IL12Rβ1.

[0134] Antibodies or antigen binding fragments thereof that bind to IL12 and/or IL23, can be further modified to increase or decrease affinity as needed and then further tested for ability to mask and reduce potency as described herein.

[0135] In certain embodiments, candidate peptides can be screened to identify a MM peptide capable of binding IL12 or IL23 using such methods as described for example in WO2010/081173 and U.S. Pat. No. 10,118,961. Such methods comprise, providing a library of peptide scaffolds, wherein each peptide scaffold comprises: a transmembrane Protein™; and a candidate peptide; contacting an IL12 or IL23 with the library; identifying at least one candidate peptide capable of binding the IL12 or IL23 polypeptide; and determining whether the dissociation constant (K_{d}) of the candidate peptide towards the IL12 or IL23 is between 1-10 nM.

### Linkers and Protease Cleavable Linkers

[0136] In certain embodiments of the fusion proteins of this disclosure, one or more different components or domains are fused directly one to the other with no linker. For example, in certain embodiments, an Fc domain may be fused directly to a MM or fused directly to a p35 or p40 polypeptide. However, in certain embodiments the masked cytokine fusion constructs comprise one or more linkers of varying lengths. Peptide linkers allow arrangement of the fusion protein to form a functional masking moiety as well as a cytokine that, when cleaved from the larger/full fusion protein, retains cytokine activity. The masked cytokine fusion constructs comprise linkers that comprise protease cleavage sites and also comprise linkers that do not contain cleavage sites.

[0137] A “linker” is a peptide that joins or links other peptides or polypeptides, such as a linker of about 2 to about 150 amino acids. In masked cytokine fusion proteins of this disclosure, a linker may be used to fuse any of the components of the fusion protein, such as an Fc polypeptide to a MM or a linker can join an Fc polypeptide to a cytokine polypeptide, e.g., p35 or p40 of IL12. In certain embodiments, a linker may be present within a MM such as where a MM is an scFV and a linker joins the VH and VL.

[0138] Exemplary linkers for use in the fusion proteins described herein include those belonging to the (GlynSer) family, such as (Gly3Ser)ₙ(Gly4Ser)₁, (Gly3Ser)i(Gly4Ser)ₙ, (Gly3Ser)ₙ(Gly4Ser)ₙ, or (Gly4Ser)ₙ, wherein n is an integer of 1 to 5. In certain embodiments, the peptide linkers suitable for connecting the different domains include sequences comprising glycine-serine linkers, for example, but not limited to, (GₘS)ₙ-GG, (SGn)m, (SEGn)m, wherein m and n are between 0-20.

[0139] In certain embodiments, a linker can be an amino acid sequence obtained, derived, or designed from an antibody hinge region sequence, a sequence linking a binding domain to a receptor, or a sequence linking a binding domain to a cell surface transmembrane region or membrane anchor. In some embodiments, a linker can have at least one cysteine capable of participating in at least one disulfide bond under physiological conditions or other standard peptide conditions (e.g., peptide purification conditions, conditions for peptide storage). In certain embodiments, a linker corresponding or similar to an immunoglobulin hinge peptide retains a cysteine that corresponds to the hinge cysteine disposed toward the amino-terminus of that hinge. In further embodiments, a linker is from an IgG1 hinge and has been modified to remove any cysteine residues or is an IgG1 hinge that has one cysteine or two cysteines corresponding to hinge cysteines.

[0140] In addition to providing a spacing function, a linker can provide flexibility or rigidity suitable for properly orienting the one or more domains of the masked cytokine fusion proteins herein, both within the fusion protein and between or among the fusion proteins and their target(s). Further, a linker can support expression of a full-length fusion protein and stability of the purified protein both in vitro and in vivo following administration to a subject in need thereof, such as a human, and is preferably non-immunogenic or poorly immunogenic in those same subjects. In certain embodiments, a linker may comprise part or all of a human immunoglobulin hinge, a stalk region of C-type lectins, a family of type II membrane proteins. Linkers range in length from about 2 to about 100 amino acids, or about 5 to about 75 amino acids, or about 10 to about 50 amino acids, or about 2 to about 40 amino acids, or about 8 to about 20 amino acids, about 10 to about 60 amino acids, about 10 to about 30 amino acids, or about 15 to about 25 amino acids.

[0141] In certain embodiments, a linker for use herein may comprise an “altered wild type immunoglobulin hinge region” or “altered immunoglobulin hinge region”. Such altered hinge regions refers to (a) a wild type immunoglobulin hinge region with up to 30 percent amino acid changes (e.g., up to 25 percent, 20 percent, 15 percent, 10 percent, or 5 percent amino acid substitutions or deletions), (b) a portion of a wild type immunoglobulin hinge region that is at least 10 amino acids (e.g., at least 12, 13, 14 or 15 amino acids) in length with up to 30 percent amino acid changes (e.g., up to 25 percent, 20 percent, 15 percent, 10 percent, or 5 percent amino acid substitutions or deletions), or (c) a portion of a wild type immunoglobulin hinge region that comprises the core hinge region (which portion may be 4, 5, 6, 7, 8, 9, 10, 11, 12, 13, 14, or 15, or at least 4, 5, 6, 7, 8, 9, 10, 11, 12, 13, 14, or 15 amino acids in length). In certain embodiments, one or more cysteine residues in a wild type immunoglobulin hinge region, such as an IgG1 hinge comprising the upper and core regions, may be substituted by one or more other amino acid residues (e.g., one or more serine residues). An altered immunoglobulin hinge region may alternatively or additionally have a proline residue of a wild type immunoglobulin hinge region, such as an IgG1 hinge comprising the upper and core regions, substituted by another amino acid residue (e.g., a serine residue).

[0142] Alternative hinge and linker sequences that can be used as connecting regions may be crafted from portions of cell surface receptors that connect IgV-like or IgC-like domains. Regions between IgV-like domains where the cell surface receptor contains multiple IgV-like domains in tandem and between IgC-like domains where the cell surface receptor contains multiple tandem IgC-like regions could also be used as connecting regions or linker peptides. In certain embodiments, hinge and linker sequences are from 5 to 60 amino acids long, and may be primarily flexible, but may also provide more rigid characteristics, may contain primarily a helical structure with minimal beta sheet structure.

[0143] Certain illustrative linkers are provided in SEQ ID Nos: 240-242. Illustrative linkers are also provided within the context of various masked cytokine and parental non-masked fusion proteins herein as set forth in SEQ ID Nos: 23-89 (see also Table 23).

[0144] Where desired, in certain embodiments, the linkers of the masked cytokine fusion proteins herein comprise a protease cleavage site. Where used, the protease cleavage sites are positioned within the linkers so as to maximize recognition and cleavage by the desired protease or proteases and minimize recognition and non-specific cleavage by other proteases. Additionally, the protease cleavage site or sites may be positioned within the linkers (or said differently, may be surrounded by linkers) and are positioned within the fusion protein as a whole so as to achieve the best desired masking and release of the active cytokine post-cleavage.

[0145] Accordingly, in certain embodiments, the masked cytokine fusion proteins disclosed herein comprise at least one protease cleavable linker (PCL), when masked and not activated.

[0146] As used herein, the PCL of the masked cytokine fusion proteins described herein includes an amino acid sequence that serves as a substrate for at least one protease, usually an extracellular protease, i.e., the PCL comprises one or more cleavage sites, also referred to as cleavage sequences. The polypeptide moiety that is fused to the masked cytokine fusion protein by the PCL and that is released from the masked cytokine fusion protein following cleavage of the PCL can be referred to herein as the cleavable moiety (CM). In certain embodiments, the CM comprises a MM. In another embodiment, the CM comprises the cytokine moiety (e.g., an IL12 or IL23 polypeptide). In certain embodiments, a masked cytokine fusion protein as described herein may comprise more than one CM, e.g., a CM that comprises a MM and a CM that comprises the cytokine polypeptide both of which are released following cleavage by a protease. In certain embodiments where a masked cytokine fusion protein comprises more than one CM, they may be fused to the masked cytokine fusion protein by the same or different PCL, that is having the same cleavage site or different cleavage sites. In this regard, the PCL may also have different linkers.

[0147] The cleavage site or cleavage sequence may be selected based on a protease that is co-localized in tissue where the activity of the unmasked (activated) cytokine is desired. A cleavage site can serve as a substrate for multiple proteases, e.g., a substrate for a serine protease and a second different protease, e.g. a matrix metalloproteinase, (an MMP)). In some embodiments, a cleavage site can serve as a substrate for more than one serine protease, e.g., a matriptase and a uPA. In some embodiments, a PCL can serve as a substrate for more than one MMP, e.g., an MMP9 and an MMP 14.

[0148] A variety of different conditions are known in which a target of interest (such as a particular tumor type, a particular tumor that expresses a particular tumor associated antigen, a particular tumor type that is infiltrated by immune cells responsive to IL12/23) is co localized with a protease, where the substrate of the protease is known in the art. In the example of cancer, the target tissue can be a cancerous tissue, particularly cancerous tissue of a solid tumor. There are reports in the literature of increased levels of proteases and the presence of innate and adaptive immune cells capable of responding to IL12/23 in a number of cancers, e.g., liquid tumors or solid tumors. See, e.g., La Rocca et al, (2004) British J. of Cancer 90(7): 1414-1421.

[0149] Non-limiting examples of disease to be targeted with the masked cytokine fusion proteins herein include: all types of cancers, such as, but not limited to breast, including by way of non-limiting example, triple negative breast cancer, ER/PR+breast cancer, and Her2+ breast cancer, lung cancer (e.g., non-small cell squamous and adenocarcinoma), colorectal cancer, gastric cancer, glioblastoma, ovarian cancer, endometrial cancer, renal cancer, sarcoma, skin cancer, cervical cancer, liver cancer, bladder cancer, cholangiocarcinoma, prostate cancer, melanomas, head and neck cancer (e.g., head and neck squamous cell carcinoma), esophageal, squamous cell cancer, basal cell carcinoma, pancreatic cancer, leukemias, including T-cell acute lymphoblastic leukemia (T-ALL), lymphoblastic diseases including multiple myeloma, and solid tumors. Indications also include bone disease or metastasis in cancer, regardless of primary tumor origin. Other illustrative diseases include rheumatoid arthritis, Crohn's disease, SLE, cardiovascular damage, and ischemia. In certain embodiments, the target disease is selected from the group consisting of colorectal cancer, pancreatic cancer, head and neck cancer, esophageal cancer, bladder cancer, cervical cancer, and lung cancer (e.g., non-small cell squamous and adenocarcinoma).

[0150] In certain embodiments, the PCL is specifically cleaved by an enzyme at a rate of about 0.001-1500×10⁴ M⁻¹S⁻¹ or at least 0.001, 0 005, 0.01, 0.05, 0.1, 0.5, 1, 2.5, 5, 7.5, 10, 15, 20, 25, 50, 75, 100, 125, 150, 200, 250, 500, 750, 1000, 1250, or 1500×10⁴M⁻¹S⁻¹.

[0151] For specific cleavage by an enzyme, contact between the enzyme and the PCL is made. In certain embodiments, when the masked cytokine (e.g., IL12 or IL23) fusion protein comprises at least a first PCL and is in the presence of sufficient enzyme activity, the PCL can be cleaved. Sufficient enzyme activity can refer to the ability of the enzyme to make contact with the PCL and effect cleavage. It can readily be envisioned that an enzyme may be in the vicinity of the PCL but is unable to cleave because of other cellular factors or protein modification of the enzyme.

[0152] In some embodiments, the PCL: has a length of up to 15 amino acids, a length of up to 20 amino acids, a length of up to 25 amino acids, a length of up to 30 amino acids, a length of up to 35 amino acids, a length of up to 40 amino acids, a length of up to 45 amino acids, a length of up to 50 amino acids, a length of up to 60 amino acids, a length in the range of 10-60 amino acids, a length in the range of 15-60 amino acids, a length in the range of 20-60 amino acids, a length in the range of 25-60 amino acids, a length in the range of 30-60 amino acids, a length in the range of 35-60 amino acids, a length in the range of 40-50 amino acids, a length in the range of 45-60 amino acids, a length in the range of 10-40 amino acids, a length in the range of 15-40 amino acids, a length in the range of 20-40 amino acids, a length in the range of 25-40 amino acids, a length in the range of 30-40 amino acids, a length in the range of 35-40 amino acids, a length in the range of 10-30 amino acids, a length in the range of 15-30 amino acids, a length in the range of 20-30 amino acids, a length in the range of 25-30 amino acids, a length in the range of 10-20 amino acids, or a length in the range of 10-15 amino acids.

[0153] In certain embodiments, the PCL comprises a protease cleavage recognition site of 6-10 amino acids, or 7-10 amino acids, or 8-10 amino acids in length. In another embodiment, the PCL consists of a protease cleavage recognition site of 6-10 amino acids, or 7-10 amino acids, or 8-10 amino acids in length. In one embodiment, the protease cleavage site is preceded on the N-terminus by a linker sequence of between about 10-20 amino acids, of between 12-16 amino acids, or about 15 amino acids. In another embodiment, the protease cleavage site is followed on the C-terminus by a linker sequence of between about 6-20, 8-15, 8-10, 10-18 amino acids, or in some cases, about 8 amino acids in length. In yet another embodiment, the protease cleavage site is preceded by a linker sequence on the N-terminus and followed by a linker sequence on the C-terminus. Thus, in certain embodiments, the protease cleavage site is situated between two linkers. The linkers on either the N or C-terminal end of the protease cleavage site can be of varying lengths, for example, between about 5-20, 6-20, 8-15, 8-10, 10-18, or 12-16. In certain embodiments the N- or C-terminal linker sequence is about 8 or about 15 amino acids in length.

[0154] Exemplary PCLs of the disclosure comprise one or more cleavage sequences recognized by any of a variety of proteases, such as, but not limited to, serine proteases, MMPs (MMP1, MMP2, MMP3, MMP7, MMP8, MMP9, MMP10, MMP11, MMP12, MMP13, MMP14, MMP15, MMP16, MMP17, MMP18 (collagenase 4), MMP19, MMP20, MMP21, etc.), adamalysins, serralysins, astacins, caspases (e.g., caspase 1, caspase 2, caspase 3, caspase 4, caspase 5, caspase 6, caspase 7, caspase 8, caspase 9, caspase 10, caspase 11, caspase 12, caspase 13, caspase 14), cathepsins, (e.g., cathepsin A, cathepsin B, cathepsin D, cathepsin E, cathepsin K, cathepsin S), FAB, granyme B, guanidinobenzoatase (GB), hepsin, elastase, legumain, matriptase 2, meprin, neurosin, MT-SP1, neprilysin, plasmin, PSA, PSMA, TACE, TMPRSS3/4, uPA, and calpain.

[0155] In certain embodiments, a PCL may comprise a cleavage sequence that is cleaved by more than one protease. In this regard, a cleavage sequence may be cleaved by 1, 2, 3, 4, 5 or more proteases. In another embodiment, a PCL may comprise a cleavage sequence that is substantially cleaved by one enzyme but not by others. Thus, in some embodiments, a PCL comprises a cleavage sequence that has high specificity. By “high specificity” is meant >90% cleavage observed by a particular protease and less than 50% cleavage observed by other proteases. In certain embodiments, a PCL comprises a cleavage sequence that demonstrates >80% cleavage by one protease but less than 50% cleavage by other proteases. In certain embodiments, a PCL comprises a cleavage sequence that demonstrates >70%, 75%, 76%, 77%, 78%, or 79%, cleavage by one protease but less than 65%, 60%, 55%, 54%, 53%, 52%, 51%, 50%, 49%, 48%, 47%, 46%, or 45% cleavage by other proteases. By way of example, in one embodiment the cleavage sequence may be >90% cleaved by matriptase and ˜75% cleaved by uPa and plasmin. In another embodiment, the cleavage sequence may be cleaved by uPa and matriptase but no specific cleavage by plasmin is observed. In yet another embodiment, the cleavage sequence may be cleaved by uPa and not by matriptase or plasmin. In one embodiment, a cleavage sequence may demonstrate some level of resistance to non-specific protease cleavage (e.g., cleavage by plasmin or other non-specific proteases). In this regard, a protease cleavage sequence may have “high non-specific protease resistance” (<25% cleavage by plasmin or an equivalent non-specific protease), “moderate non-specific protease resistance” (about <75% cleavage by plasmin or an equivalent non-specific protease), or “low non-specific protease resistance” (up to about 90% cleavage by plasmin or an equivalent non-specific protease). In certain embodiments, high non-specific protease resistance is about between <25%-<35% cleavage by plasmin or an equivalent non-specific protease. In some embodiments, moderate non-specific protease resistance is about between <50%-<80% cleavage by plasmin or an equivalent non-specific protease. Such cleavage activity can be measured using assays known in the art, such as by incubation with the appropriate proteases at comparable ratios of enzyme:substrate for all enzymes, followed by SDS-PAGE or other analysis. In certain embodiments, a protease cleavage sequence may display up to complete resistance to protease cleavage to 24 hours contact with protease. In other embodiments, a protease cleavage sequence may display up to complete resistance to non-specific protease cleavage after 0.5 hour-36 hours contact with protease. In another embodiment, a protease cleavage sequence displays up to complete resistance to non-specific protease cleavage after 0.5, 1, 2, 3, 4, 5, 6, 7, 8, 9, 10, 12, 20, 24, 36, 48, or 72 hours contact with an appropriate protease.

[0156] Thus, in certain embodiments, the cleavage sequences are selected based on preferences for various desired proteases. In this way, a desired cleavage profile for a particular PCL comprising a cleavage sequence may be selected for a desired purpose (e.g., high specific cleavage in particular tumor microenvironments or specific organs) where a particular protease or set of proteases may demonstrate high, specific, elevated, efficient, moderate, low or no cleavage of a particular cleavage sequence within a PCL. Methods for determining cleavage are known in the art and are described, for example, in Example 2 herein.

[0157] In certain embodiments, a PCL may comprise one or more cleavage sequences arranged in tandem, with or without additional linkers in between each cleavage site. In certain embodiments, a PCL comprises a first cleavage sequence and a second cleavage sequence where the first cleavage sequence is cleaved by a first protease and the second cleavage sequence is cleaved by a second protease. As a non-limiting example, a PCL may comprise a first cleavage sequence cleaved by matriptase and uPa and a second cleavage sequence cleaved by an MMP. In certain embodiments, a PCL comprises a first cleavage sequence, a second cleavage sequence and a third cleavage sequence where the first cleavage sequence is cleaved by a first protease, the second cleavage sequence is cleaved by a second protease and the third cleavage sequence is cleaved by a third protease.

[0158] Illustrative proteolytic enzymes and their recognition sequences useful in the masked IL12 fusion proteins herein can be identified by one of skill and are known in the art, such as those described in MEROPS database (see e.g., Rawlings, et al. Nucleic Acids Research, Volume 46, Issue D1, 4 Jan. 2018, Pages D624-D632), and elsewhere (Hoadley et al, Cell, 2018; GTEX Consortium, Nature, 2017; Robinson et al, Nature, 2017).

[0159] Cleavage sequences may be identified and screened for example, as described in Example 2. Exemplary cleavage sequences include, but are not limited to, those identified in Example 2 and Table 3 herein. Illustrative cleavage sequences for use in the masked cytokine fusion proteins described herein are set forth in SEQ ID Nos:2-10 and 170-239. Other methods may also be used for identifying cleavage sequence for use herein, such as described in U.S. Pat. Nos. 9,453,078, 10,138,272, 9,562,073 and published international application numbers WO 2015/048329; WO2015116933; WO2016118629.

[0160] Other illustrative cleavage sequences for use herein are described, for example, in U.S. Pat. Nos. 9,453,078, 10,138,272, 9,562,073 and published international application numbers WO 2015/048329; WO2015116933; WO2016118629. Such cleavage sequences include, for example, LSGRSANP (SEQ ID NO:186), TSGRSANP (SEQ ID NO:2) and LSGRSDNH (SEQ ID NO:3).

[0161] Other illustrative cleavage sequences for use herein include the cleavage sequences described in WO2019075405 and WO2016118629, shown in Table 24 and provided in SEQ ID NOs:180-239.

[0162] The cleavage sequences described herein and PCLs comprising the cleavage sequences may be used in any of a variety of recombinant proteins where cleavage of a particular moiety from the larger recombinant protein is desired. Such recombinant proteins may comprise two or more domains, such as, but not limited to, the various components or domains described herein, including, but not limited to, a masking moiety, a cytokine such as IL12 or IL23, an antibody or antigen-binding fragment thereof, one or more linkers, an Fc domain, and a targeting domain.

[0163] Accordingly, one aspect of the present disclosure provides a recombinant polypeptide that comprises a protease cleavable linker (PCL) wherein the protease cleavable linker comprises one or more of the cleavage sequences set forth herein. In one embodiment, the present disclosure provides a recombinant polypeptide that comprises a PCL wherein the protease cleavable linker comprises the amino acid sequence MSGRSANA (SEQ ID NO:10). In certain embodiments, the recombinant polypeptide comprising a PCL described herein comprises two heterologous polypeptides, a first polypeptide located amino (N) terminally to the PCL and a second polypeptide located carboxyl (C) terminally to the PCL, the two heterologous polypeptides thus separated by the PCL.

[0164] In one embodiment, the two heterologous polypeptides are selected from a cytokine polypeptide or functional fragment thereof, an antibody, an antigen-binding fragment of an antibody and an Fc domain. In another embodiment, the recombinant polypeptide comprises a cytokine polypeptide or a functional fragment thereof, a MM, and an Fc domain. In certain other embodiments, the MM is a single-chain Fv (scFv) antibody fragment that binds to the cytokine or a cytokine receptor polypeptide or a cytokine-binding fragment thereof. In a further embodiment, the recombinant polypeptide comprises an antibody or antigen binding fragment thereof that binds a target, and a MM that binds to the antibody or antigen binding fragment thereof and blocks binding of the antibody or antigen binding fragment thereof to the target.

[0165] In one embodiment, the present disclosure provides an isolated recombinant polypeptide comprising a PCL, wherein the PCL comprises the amino acid sequence MSGRSANA as set forth in SEQ ID NO: 10, wherein the PCL comprises a substrate for a protease (protease cleavage site), wherein the isolated recombinant polypeptide comprises at least one moiety (M) selected from the group consisting of a moiety that is located amino (N) terminally to the PCL (MN), a moiety that is located carboxyl (C) terminally to the PCL (MC), and combinations thereof, and wherein the MN or MC is selected from the group consisting of an antibody or antigen binding fragment thereof; a cytokine or a functional fragment thereof; a MM (as described in more detail elsewhere herein); a cytokine receptor or a functional fragment thereof; an immunomodulatory receptor, or functional fragment thereof; an immune checkpoint protein or a functional fragment thereof; a tumor associated antigen; a targeting domain; a therapeutic agent; an antineoplastic agent; a toxic agent; a drug; and a detectable label.

### Fc Domains

[0166] In some embodiments, the masked IL12 fusion proteins described herein comprise an Fc, and in some embodiments, the Fc is a dimeric Fc.

[0167] The term “Fc domain” or “Fc region” herein is used to define a C-terminal region of an immunoglobulin heavy chain that contains at least a portion of the constant region. The term includes native sequence Fc regions and variant Fc regions. Unless otherwise specified herein, numbering of amino acid residues in the Fc region or constant region is according to the EU numbering system, also called the EU index, as described in Kabat et al, Sequences of Proteins of Immunological Interest, 5th Ed. Public Health Service, National Institutes of Health, Bethesda, Md., 1991. An “Fc polypeptide” of a dimeric Fc as used herein refers to one of the two polypeptides forming the dimeric Fc domain, i.e. a polypeptide comprising C-terminal constant regions of an immunoglobulin heavy chain, capable of stable self-association. For example, an Fc polypeptide of a dimeric IgG Fc comprises an IgG CH2 and an IgG CH3 constant domain sequence.

[0168] An Fc domain comprises either a CH3 domain or a CH3 and a CH2 domain. The CH3 domain comprises two CH3 sequences, one from each of the two Fc polypeptides of the dimeric Fc. The CH2 domain comprises two CH2 sequences, one from each of the two Fc polypeptides of the dimeric Fc.

[0169] In some aspects, the Fc comprises at least one or two CH3 sequences. In some aspects, the Fc is coupled, with or without one or more linkers, to a first antigen-binding polypeptide construct and/or a second antigen-binding polypeptide construct. In some aspects, the Fc is a human Fc. In some aspects, the Fc is a human IgG or IgG1 Fc. In some aspects, the Fc is a heterodimeric Fc. In some aspects, the Fc comprises at least one or two CH2 sequences.

[0170] In some aspects, the Fc comprises one or more modifications in at least one of the CH3 sequences. In some aspects, the Fc comprises one or more modifications in at least one of the CH2 sequences. In some aspects, an Fc is a single polypeptide. In some aspects, an Fc is multiple peptides, e.g., two polypeptides.

[0171] In some aspects, an Fc is an Fc described in patent applications PCT/CA2011/001238, filed Nov. 4, 2011 (WO2012058768; U.S. Pat. Nos. 9,562,109 and 10,875,931) or PCT/CA2012/050780, filed Nov. 2, 2012 (WO2013063702); U.S. Pat. Nos. 9,574,010; 9,732,155; 10,457,742 and US Pat. Application No.: US2020008741), all of which are herein incorporated by reference in their entirety.

### Modified CH3 Domains

[0172] In some aspects, the masked IL12 fusion proteins described herein comprises a heterodimeric Fc (“HetFc”) comprising a modified CH3 domain that has been asymmetrically modified. The heterodimeric Fc can comprise two heavy chain constant domain polypeptides: a first Fc polypeptide and a second Fc polypeptide, which can be used interchangeably provided that the Fc domain comprises one first Fc polypeptide and one second Fc polypeptide. Generally, the first Fc polypeptide comprises a first CH3 sequence and the second Fc polypeptide comprises a second CH3 sequence. In certain diagrams and elsewhere herein, a first Fc polypeptide and a second Fc polypeptide may be referred to as Fc polypeptide A and Fc polypeptide B (or chain A or chain B as shorthand), which similarly can be used interchangeably provided that the Fc domain or region comprises one Fc polypeptide A and one Fc polypeptide B. In some cases, the Fc domain which comprises one Fc polypeptide A and one Fc polypeptide B may be referred to as a variant and the variant may be referred to by a particular variant number to distinguish it from other Fc variants.

[0173] Two CH3 sequences that comprise one or more amino acid modifications introduced in an asymmetric fashion generally results in a heterodimeric Fc, rather than a homodimer, when the two CH3 sequences dimerize. As used herein, “asymmetric amino acid modifications” refers to any modification where an amino acid at a specific position on a first CH3 sequence is different from the amino acid on a second CH3 sequence at the same position, and the first and second CH3 sequence preferentially pair to form a heterodimer, rather than a homodimer. This heterodimerization can be a result of modification of only one of the two amino acids at the same respective amino acid position on each sequence; or modification of both amino acids on each sequence at the same respective position on each of the first and second CH3 sequences. The first and second CH3 sequence of a heterodimeric Fc can comprise one or more than one asymmetric amino acid modification.

[0174] Table C provides the amino acid sequence of the human IgG1 Fc sequence, corresponding to amino acids 231 to 447 of the full-length human IgG1 heavy chain. The CH3 sequence comprises amino acid 341-447 of the full-length human IgG1 heavy chain.

[0175] Typically, an Fc can include two contiguous heavy chain sequences (A and B) that are capable of dimerizing. In some aspects, one or both sequences of an Fc include one or more mutations or modifications at the following locations: L351, F405, Y407, T366, K392, T394, T350, S400, and/or N390, using EU numbering. In some aspects, an Fc includes a variant sequence shown in Table 2. In some aspects, an Fc includes the mutations of Variant 1 A-B. In some aspects, an Fc includes the mutations of Variant 2 A-B. In some aspects, an Fc includes the mutations of Variant 3 A-B. In some aspects, an Fc includes the mutations of Variant 4 A-B. In some aspects, an Fc includes the mutations of Variant 5 A-B.

TABLE C
IgG1 Fc sequences

| Human IgG1 | APELLGGPSVFLFPPK | |
|---|---|---|
| Fc sequence | PKDTLMISRTPEVTC | |
| 231-447 | VVVDVSHEDPEVKFN | |
| (EU-numbering) | WYVDGVEVHNAKTKP | |
| | REEQYNSTYRVVSVL | |
| | TVLHQDWLNGKEYKC | |
| | KVSNKALPAPIEKTI | |
| | SKAKGQPREPQVYTL | |
| | PPSRDELTKNQVSLT | |
| | CLVKGFYPSDIAVEW | |
| | ESNGQPENNYKTTPP | |
| | VLDSDGSFFLYSKLT | |
| | VDKSRWQQGNVFSCS | |
| | VMHEALHNHYTQKSL | |
| | SLSPGK | |
| Variant | | |
| IgG1 Fc | | |
| sequence | | |
| (231-447) | Chain | Mutations |
| 1 | A | L351Y_F405A_Y407V |
| 1 | B | T366LK392M_T394W |
| 2 | A | L351Y_F405A_Y407V |
| 2 | B | T366L_K392L_T394W |
| 3 | A | T350V_L351Y_F405A_Y407V |
| 3 | B | T350V_T366L_K392L_T394W |
| 4 | A | T350V_L351Y_F405A_Y407V |
| 4 | B | T350V_T366L_K392M_T394W |
| 5 | A | T350V_L351Y_S400E_ |
| | | F405A_Y407V |
| 5 | B | T350V_T366L_N390R_ |
| | | K392M_T394W |

[0176] The first and second CH3 sequences can comprise amino acid mutations as described herein, with reference to amino acids 231 to 447 of the full-length human IgG1 heavy chain. In one embodiment, the heterodimeric Fc comprises a modified CH3 domain with a first CH3 sequence having amino acid modifications at positions F405 and Y407, and a second CH3 sequence having amino acid modifications at position T394. In one embodiment, the heterodimeric Fc comprises a modified CH3 domain with a first CH3 sequence having one or more amino acid modifications selected from L351Y, F405A, and Y407V, and the second CH3 sequence having one or more amino acid modifications selected from T366L, T366I, K392L, K392M, and T394W.

[0177] In one embodiment, a heterodimeric Fc comprises a modified CH3 domain with a first CH3 sequence having amino acid modifications at positions L351, F405 and Y407, and a second CH3 sequence having amino acid modifications at positions T366, K392, and T394, and one of the first or second CH3 sequences further comprising amino acid modifications at position Q347, and the other CH3 sequence further comprising amino acid modification at position K360. In another embodiment, a heterodimeric Fc comprises a modified CH3 domain with a first CH3 sequence having amino acid modifications at positions L351, F405 and Y407, and a second CH3 sequence having amino acid modifications at position T366, K392, and T394, one of the first or second CH3 sequences further comprising amino acid modifications at position Q347, and the other CH3 sequence further comprising amino acid modification at position K360, and one or both of said CH3 sequences further comprise the amino acid modification T350V.

[0178] In one embodiment, a heterodimeric Fc comprises a modified CH3 domain with a first CH3 sequence having amino acid modifications at positions L351, F405 and Y407, and a second CH3 sequence having amino acid modifications at positions T366, K392, and T394 and one of said first and second CH3 sequences further comprising amino acid modification of D399R or D399K and the other CH3 sequence comprising one or more of T411E, T411D, K409E, K409D, K392E and K392D. In another embodiment, a heterodimeric Fc comprises a modified CH3 domain with a first CH3 sequence having amino acid modifications at positions L351, F405 and Y407, and a second CH3 sequence having amino acid modifications at positions T366, K392, and T394, one of said first and second CH3 sequences further comprises amino acid modification of D399R or D399K and the other CH3 sequence comprising one or more of T411E, T411D, K409E, K409D, K392E and K392D, and one or both of said CH3 sequences further comprise the amino acid modification T350V.

[0179] In one embodiment, a heterodimeric Fc comprises a modified CH3 domain with a first CH3 sequence having amino acid modifications at positions L351, F405 and Y407, and a second CH3 sequence having amino acid modifications at positions T366, K392, and T394, wherein one or both of said CH3 sequences further comprise the amino acid modification of T350V.

[0180] In one embodiment, a heterodimeric Fc comprises a modified CH3 domain comprising the following amino acid modifications, where “A” represents the amino acid modifications to the first CH3 sequence, and “B” represents the amino acid modifications to the second CH3 sequence: A:L351Y_F405A_Y407V, B:T366L_K392M_T394W, A:L351Y_F405A_Y407V, B:T366L_K392L_T394W, A:T350V_L351Y_F405A_Y407V, B:T350V_T366L_K392L_T394W, A:T350V_L351Y_F405A_Y407V, B:T350V_T366L_K392M_T394W, A:T350V_L351Y_S400E_F405A_Y407V, and/or B:T350V_T366L_N390R_K392M_T394W.

[0181] The one or more asymmetric amino acid modifications can promote the formation of a heterodimeric Fc in which the heterodimeric CH3 domain has a stability that is comparable to a wild-type homodimeric CH3 domain. In an embodiment, the one or more asymmetric amino acid modifications promote the formation of a heterodimeric Fc domain in which the heterodimeric Fc domain has a stability that is comparable to a wild-type homodimeric Fc domain. In an embodiment, the one or more asymmetric amino acid modifications promote the formation of a heterodimeric Fc domain in which the heterodimeric Fc domain has a stability observed via the melting temperature (Tm) in a differential scanning calorimetry study, and where the melting temperature is within 4° C. of that observed for the corresponding symmetric wild-type homodimeric Fc domain. In some aspects, the Fc comprises one or more modifications in at least one of the CH3 sequences that promote the formation of a heterodimeric Fc with stability comparable to a wild-type homodimeric Fc.

### Modified CH2 Domains

[0182] In certain embodiments, an Fc domain contemplated for use herein is an Fc having a modified CH2 domain. In some embodiments, an Fc domain contemplated for use herein is an IgG Fc having a modified CH2 domain, wherein the modification of the CH2 domain results in altered binding to one or more Fc receptors (FcRs) such as receptors of the FcγRI, FcγRII and FcγRIII subclasses.

[0183] A number of amino acid modifications to the CH2 domain that selectively alter the affinity of the Fc for different Fcγ receptors are known in the art. Amino acid modifications that result in increased binding and amino acid modifications that result in decreased binding can both be useful in certain indications. For example, increasing binding affinity of an Fc for FcγRIIIa (an activating receptor) results in increased antibody dependent cell-mediated cytotoxicity (ADCC), which in turn results in increased lysis of the target cell. Decreased binding to FcγRIIb (an inhibitory receptor) likewise may be beneficial in some circumstances. In certain indications, a decrease in, or elimination of, ADCC and complement-mediated cytotoxicity (CDC) may be desirable. In such cases, modified CH2 domains comprising amino acid modifications that result in increased binding to FcγRIIb or amino acid modifications that decrease or eliminate binding of the Fc region to all of the Fcγ receptors (“knock-out” variants) may be useful.

[0184] Examples of amino acid modifications to the CH2 domain that alter binding of the Fc by Fcγ receptors include, but are not limited to, the following: S298A/E333A/K334A and S298A/E333A/K334A/K326A (increased affinity for FcγRIIIa) (Lu, et al., 2011, J Immunol Methods, 365(1-2):132-41); F243L/R292P/Y300L/V305I/P396L (increased affinity for FcγRIIIa) (Stavenhagen, et al., 2007, Cancer Res, 67(18):8882-90); F243L/R292P/Y300L/L235V/P396L (increased affinity for FcγRIIIa) (Nordstrom J L, et al., 2011, Breast Cancer Res, 13(6):R123); F243L (increased affinity for FcγRIIIa) (Stewart, et al., 2011, Protein Eng Des Sel., 24(9):671-8); S298A/E333A/K334A (increased affinity for FcγRIIIa) (Shields, et al., 2001, J Biol Chem, 276(9):6591-604); S239D/I332E/A330L and S239D/I332E (increased affinity for FcγRIIIa) (Lazar, et al., 2006, Proc Natl Acad Sci USA, 103(11):4005-10), and S239D/S267E and S267E/L328F (increased affinity for FcγRIIb) (Chu, et al., 2008, Mol Immunol, 45(15):3926-33).

[0185] Additional modifications that affect Fc binding to Fcγ receptors are described in Therapeutic Antibody Engineering (Strohl & Strohl, Woodhead Publishing series in Biomedicine No 11, ISBN 1 907568 37 9, October 2012, page 283).

[0186] In certain embodiments, a masked IL12 fusion protein comprises a scaffold based on an IgG Fc having a modified CH2 domain, in which the modified CH2 domain comprises one or more amino acid modifications that result in decreased or eliminated binding of the Fc region to all of the Fcγ receptors (i.e. a “knock-out” variant).

[0187] Various publications describe strategies that have been used to engineer antibodies to produce “knock-out” variants (see, for example, Strohl, 2009, Curr Opin Biotech 20:685-691, and Strohl & Strohl, “Antibody Fc engineering for optimal antibody performance” In Therapeutic Antibody Engineering, Cambridge: Woodhead Publishing, 2012, pp 225-249). These strategies include reduction of effector function through modification of glycosylation (described in more detail below), use of IgG2/IgG4 scaffolds, or the introduction of mutations in the hinge or CH2 domain of the Fc (see also, U.S. Patent Publication No. 2011/0212087, International Publication No. WO 2006/105338, U.S. Patent Publication No. 2012/0225058, U.S. Patent Publication No. 2012/0251531 and Strop et al., 2012, J. Mol. Biol., 420: 204-219).

[0188] Specific, non-limiting examples of known amino acid modifications to reduce FcγR and/or complement binding to the Fc include those identified in Table D.

TABLE D
Modifications to Reduce Fcγ Receptor
or Complement Binding to the Fc

| Company | Mutations |
|---|---|
| GSK | N297A |
| Ortho Biotech | L234A/L235A |
| Protein Design labs | IgG2 V234A/G237A |
| Wellcome Labs | IgG4 L235A/G237A/E318A |
| GSK | IgG4 S228P/L236E |
| Merck | IgG2 H268Q/V309L/A330S/A331S |
| Bristol-Myers | C220S/C226S/C229S/P238S |
| Seattle Genetics | C226S/C229S/E3233P/L235V/L235A |
| Medimmune | L234F/L235E/P331S |

[0189] Additional examples include Fc regions engineered to include the amino acid modifications L234A/L235A/D265S. In addition, asymmetric amino acid modifications in the CH2 domain that decrease binding of the Fc to all Fcγ receptors are described in International Publication No. WO 2014/190441.

[0190] In additional embodiments, certain amino acid substitutions are introduced into human IgG1 Fc for Fc domain of the present disclosure to ablate immune effector functions such as antibody-dependent cell cytotoxicity (ADCC) and complement-dependent cytotoxicity (CDC). Mutations in the CH2 region of the antibody heavy chains may include positions 234, 235, and 265 in EU numbering to reduce or eliminate immune effector functions.

### Targeting Domain

[0191] In certain embodiments, the masked IL12 fusion proteins described herein may comprise a “targeting domain” that targets the fusion proteins to a site of action (e.g. sites of inflammation, a particular anatomical site such as an organ, or to a tumor). As used herein, the “targeted antigen” is the antigen recognized and specifically bound by the targeting domain.

[0192] In some embodiments, the targeting domain is specific for (specifically binds) an antigen found on cells in a protease-rich environment such as the tumor microenvironment. In some embodiments, the encoded targeting domain is specific for (e.g., specifically binds or recognizes) regulatory T cells (Tregs), for example targeting the CCR4 or CD39 receptors. Other suitable targeting domains comprise those that have a cognate ligand that is overexpressed in inflamed tissues, e.g., the IL1 receptor, or the IL6 receptor. In other embodiments, a suitable targeting domain is one that has a cognate ligand present on an immune cell such as a dendritic cell (DC), a T cell, an NK cell, etc. In other embodiments, the suitable targeting domain comprise those that have a cognate ligand that is overexpressed in tumor tissue, e.g., a tumor-associated antigen (TAA).

[0193] TAAs contemplated herein for tumor targeting include but are not limited to EpCAM, EGFR, HER-2, HER-3, c-Met, FOLR1, and CEA. In certain embodiments, the masked fusion proteins comprise two targeting domains that bind to two different target antigens known to be expressed on a diseased cell or tissue. Exemplary pairs of antigen binding domains include but are not limited to EGFR/CEA, EpCAM/CEA, and HER-2/HER-3.

[0194] Suitable targeting domains include antigen-binding domains, such as antibodies and fragments thereof including, a polyclonal antibody, a recombinant antibody, a human antibody, a humanized antibody a single chain variable fragment (scFv), single-domain antibody such as a heavy chain variable domain (VH), a light chain variable domain (VL) and a variable domain of camelid-type nanobody (VHH), a dAb and the like. Other suitable antigen-binding domain include non-immunoglobulin proteins that mimic antibody binding and/or structure such as, anticalins, affilins, affibody molecules, affimers, affitins, alphabodies, avimers, DARPins, fynomers, kunitz domain peptides, monobodies, and binding domains based on other engineered scaffolds such as SpA, GroEL, fibronectin, lipocallin and CTLA4 scaffolds. Further examples of antigen-binding polypeptides include a ligand for a desired receptor, a ligand-binding portion of a receptor, a lectin, and peptides that binds to or associates with one or more target antigens.

[0195] In some embodiments, a targeting domain specifically binds to a cell surface molecule. In some embodiments, a targeting domain specifically binds to a tumor antigen. In some embodiments, the targeting domain specifically and independently binds to a tumor antigen selected from at least one of Fibroblast activation protein alpha (FAPa), Trophoblast glycoprotein (5T4), Tumor-associated calcium signal transducer 2 (Trop2), Fibronectin EDB (EDB-FN), fibronectin F.IIIB domain, CGS-2, EpCAM, EGER, HER-2, HER-3, cMet, CEA, and FOLR1. In some embodiments, the targeting polypeptides specifically and independently bind to two different antigens, wherein at least one of the antigens is a tumor antigen selected from EpCAM, EGFR, HER-2, HER-3, cMet, CEA, and FOLR1. The TAA targeted by the targeting domain can be a tumor antigen expressed on a tumor cell. Tumor antigens are well known in the art and include, for example, EpCAM, EGFR, HER-2, HER-3, c-Met, FOLR1, PSMA, CD38, BCMA, and CEA. 5T4, AFP, B7-H3, Cadherin-6, CAIX, CD117, CD123, CD138, CD166, CD19, CD20, CD205, CD22, CD30, CD33, CD352, CD37, CD44, CD52, CD56, CD70, CD71, CD74, CD79b, DLL3, EphA2, FAP, FGFR2, FGFR3, GPC3, gpA33, FLT-3, gpNMB, HPV-16 E6, HPV-16 E7, ITGA2, ITGA3, SLC39A6, MAGE, mesothelin, Mud, Muc16, NaPi2b, Nectin-4, P-cadherin, NY-ESO-1, PRLR, PSCA, PTK7, ROR1, SLC44A4, SLTRK5, SLTRK6, STEAP1, TIM1, Trop2, WT1.

[0196] In some embodiments, the targeted antigen is an immune checkpoint protein. Examples of immune checkpoint proteins include but are not limited to CD27, CD137, 2B4, TIGIT, CD155, ICOS, HVEM, CD40L, LIGHT, TIM-1, X40, DNAM-1, PD-L1, PD1, PD-L2, CTLA-4, CD80, CD40, CEACAM1, CD48, CD70, A2AR, CD39, CD73, B7-H3, B7-H4, BTLA, IDO1, ID02, TDO, KIR, LAG-3, TIM-3, or VISTA. In certain embodiments, the targeting domain is an antibody or antigen-binding fragment thereof that specifically binds to an immune checkpoint protein or the targeting domain is a ligand that binds to an immune checkpoint protein or is a binding fragment thereof.

[0197] The targeting domain can specifically bind to a cell surface molecule such as a protein, lipid or polysaccharide. In some embodiments, a targeted antigen is an antigen expressed on a tumor cell, virally infected cell, bacterially infected cell, damaged red blood cell, arterial plaque cell, inflamed or fibrotic tissue cell. The targeted antigen can comprise an immune response modulator. Examples of immune response modulator include but are not limited to granulocyte-macrophage colony stimulating factor (GM-CSF), macrophage colony stimulating factor (M-CSF), granulocyte colony stimulating factor (G-CSF), interleukin 2 (IL2), interleukin 3 (IL3), interleukin 12 (IL12), interleukin 15 (IL15), B7-1 (CD80), B7-2 (CD86), GITRL, CD3, or GITR.

[0198] In certain embodiments, the targeting domain specifically binds a cytokine receptor. Examples of cytokine receptors include, but are not limited to, Type I cytokine receptors, such as GM-CSF receptor, G-CSF receptor, Type I IL receptors, Epo receptor, LIF receptor, CNTF receptor, TPO receptor; Type II Cytokine receptors, such as IFN-alpha receptor (IFNAR1, IFNAR2), IFB-beta receptor, IFN-gamma receptor (IFNGR1, IFNGR2), Type II IF receptors; chemokine receptors, such as CC chemokine receptors, CXC chemokine receptors, CX3C chemokine receptors, XC chemokine receptors; tumor necrosis receptor superfamily receptors, such as TNFRSF5/CD40, TNFRSF8/CD30, TNFRSF7/CD27, TNFRSF1A/TNFRUCD120a, TNFRSF1B/TNFR2/CD120b; TGF-beta receptors, such as TGF-beta receptor 1, TGF-beta receptor 2; Ig super family receptors, such as IF-1 receptors, CSF-1R, PDGFR (PDGFRA, PDGFRB), SCFR.

[0199] In some embodiments, the targeting domain is fused to the masked IL12 fusion protein via a linker or a PCL. In certain embodiments, the linker fusing the targeting domain to the masked IL12 fusion protein is a PCL which is cleaved at the site of action (e.g. by inflammation or cancer specific proteases). In this regard, the PCL may be the same as or different from any other PCL that is present in the masked IL12 fusion protein, such as a PCL fusing a MM to an Fc polypeptide, a PCL present with the MM or a PCL that links an IL12 polypeptide to an Fc polypeptide. In certain embodiments, the PCL fusing the targeting domain is the same as a PCL fusing the MM to an Fc polypeptide and/or the PCL fusing the IL12 to an Fc polypeptide whereby, all of the cleavage sites are cleaved upon reaching the target. In some embodiments, the targeting domain is fused to the masked IL12 fusion protein via a linker which is not cleaved at the site of action (e.g. by inflammation or cancer specific proteases).

### Polypeptides and Polynucleotides

[0200] The masked cytokine (e.g., IL12 and other members of the IL12 family of cytokines) fusion proteins described herein comprise at least one polypeptide. Also described are polynucleotides encoding the polypeptides described herein. The masked cytokine fusion proteins are typically isolated.

[0201] As used herein, “isolated” means an agent (e.g., a polypeptide or polynucleotide) that has been identified and separated and/or recovered from a component of its natural cell culture environment. Contaminant components of its natural environment are materials that would interfere with diagnostic or therapeutic uses for the masked cytokine fusion proteins, and may include enzymes, hormones, and other proteinaceous or non-proteinaceous solutes. Isolated also refers to an agent that has been synthetically produced, e.g., via human intervention.

[0202] The terms “polypeptide,” “peptide” and “protein” are used interchangeably herein to refer to a polymer of amino acid residues. That is, a description directed to a polypeptide applies equally to a description of a peptide and a description of a protein, and vice versa. The terms apply to naturally occurring amino acid polymers as well as amino acid polymers in which one or more amino acid residues is a non-naturally encoded amino acid. As used herein, the terms encompass amino acid chains of any length, including full length proteins, wherein the amino acid residues are linked by covalent peptide bonds.

[0203] The term “amino acid” refers to naturally occurring and non-naturally occurring amino acids, as well as amino acid analogs and amino acid mimetics that function in a manner similar to the naturally occurring amino acids. Naturally encoded amino acids are the 20 common amino acids (alanine, arginine, asparagine, aspartic acid, cysteine, glutamine, glutamic acid, glycine, histidine, isoleucine, leucine, lysine, methionine, phenylalanine, praline, serine, threonine, tryptophan, tyrosine, and valine) and pyrrolysine and selenocysteine. Amino acid analogs refers to compounds that have the same basic chemical structure as a naturally occurring amino acid, i.e., an a carbon that is bound to a hydrogen, a carboxyl group, an amino group, and an R group, such as, homoserine, norleucine, methionine sulfoxide, methionine methyl sulfonium. Such analogs have modified R groups (such as, norleucine) or modified peptide backbones, but retain the same basic chemical structure as a naturally occurring amino acid. Reference to an amino acid includes, for example, naturally occurring proteogenic L-amino acids; D-amino acids, chemically modified amino acids such as amino acid variants and derivatives; naturally occurring non-proteogenic amino acids such as β-alanine, ornithine, etc.; and chemically synthesized compounds having properties known in the art to be characteristic of amino acids. Examples of non-naturally occurring amino acids include, but are not limited to, α-methyl amino acids (e.g. α-methyl alanine), D-amino acids, histidine-like amino acids (e.g., 2-amino-histidine, β-hydroxy-histidine, homohistidine), amino acids having an extra methylene in the side chain (“homo” amino acids), and amino acids in which a carboxylic acid functional group in the side chain is replaced with a sulfonic acid group (e.g., cysteic acid). The incorporation of non-natural amino acids, including synthetic non-native amino acids, substituted amino acids, or one or more D-amino acids into the proteins described herein may be advantageous in a number of different ways. D-amino acid-containing peptides, etc., exhibit increased stability in vitro or in vivo compared to L-amino acid-containing counterparts. Thus, the construction of peptides, etc., incorporating D-amino acids can be particularly useful when greater intracellular stability is desired or required. More specifically, D-peptides, etc., are resistant to endogenous peptidases and proteases, thereby providing improved bioavailability of the molecule, and prolonged lifetimes in vivo when such properties are desirable. Additionally, D-peptides, etc., cannot be processed efficiently for major histocompatibility complex class II-restricted presentation to T helper cells, and are therefore, less likely to induce humoral immune responses in the whole organism.

[0204] Amino acids may be referred to herein by either their commonly known three letter symbols or by the one-letter symbols recommended by the IUPAC-IUB Biochemical Nomenclature Commission. Nucleotides, likewise, may be referred to by their commonly accepted single-letter codes.

[0205] Also provided herein are polynucleotides encoding the masked cytokine fusion proteins. The term “polynucleotide” or “nucleotide sequence” is intended to indicate a consecutive stretch of two or more nucleotide molecules. The nucleotide sequence may be of genomic, cDNA, RNA, semisynthetic or synthetic origin, or any combination thereof.

[0206] The term “nucleic acid” refers to deoxyribonucleotides, deoxyribonucleosides, ribonucleosides, or ribonucleotides and polymers thereof in either single- or double-stranded form. Unless specifically limited, the term encompasses nucleic acids containing known analogues of natural nucleotides which have similar binding properties as the reference nucleic acid and are metabolized in a manner similar to naturally occurring nucleotides. Unless specifically limited otherwise, the term also refers to oligonucleotide analogs including PNA (peptidonucleic acid), analogs of DNA used in antisense technology (phosphorothioates, phosphoroamidates, and the like). Unless otherwise indicated, a particular nucleic acid sequence also implicitly encompasses conservatively modified variants thereof (including but not limited to, degenerate codon substitutions) and complementary sequences as well as the sequence explicitly indicated. Specifically, degenerate codon substitutions may be achieved by generating sequences in which the third position of one or more selected (or all) codons is substituted with mixed-base and/or deoxyinosine residues (Batzer et al., Nucleic Acid Res. 19:5081 (1991); Ohtsuka et al., J. Biol. Chem. 260:2605-2608 (1985); Rossolini et al., Mol. Cell. Probes 8:91-98 (1994)).

[0207] “Conservatively modified variants” applies to both amino acid and nucleic acid sequences. With respect to particular nucleic acid sequences, “conservatively modified variants” refers to those nucleic acids which encode identical or essentially identical amino acid sequences, or where the nucleic acid does not encode an amino acid sequence, to essentially identical sequences. Because of the degeneracy of the genetic code, a large number of functionally identical nucleic acids encode any given protein. For instance, the codons GCA, GCC, GCG and GCU all encode the amino acid alanine. Thus, at every position where an alanine is specified by a codon, the codon can be altered to any of the corresponding codons described without altering the encoded polypeptide. Such nucleic acid variations are “silent variations,” which are one species of conservatively modified variations. Every nucleic acid sequence herein which encodes a polypeptide also describes every possible silent variation of the nucleic acid. One of ordinary skill in the art will recognize that each codon in a nucleic acid (except AUG, which is ordinarily the only codon for methionine, and TGG, which is ordinarily the only codon for tryptophan) can be modified to yield a functionally identical molecule. Accordingly, each silent variation of a nucleic acid which encodes a polypeptide is implicit in each described sequence.

[0208] As to amino acid sequences, one of ordinary skill in the art will recognize that individual substitutions, deletions or additions to a nucleic acid, peptide, polypeptide, or protein sequence which alters, adds or deletes a single amino acid or a small percentage of amino acids in the encoded sequence is a “conservatively modified variant” where the alteration results in the deletion of an amino acid, addition of an amino acid, or substitution of an amino acid with a chemically similar amino acid. Conservative substitution tables providing functionally similar amino acids are known to those of ordinary skill in the art. Such conservatively modified variants are in addition to and do not exclude polymorphic variants, interspecies homologs, and alleles described herein.

[0209] Conservative substitution tables providing functionally similar amino acids are known to those of ordinary skill in the art. The following eight groups each contain amino acids that are conservative substitutions for one another: 1) Alanine (A), Glycine (G); 2) Aspartic acid (D), Glutamic acid (E); 3) Asparagine (N), Glutamine (Q); 4) Arginine (R), Lysine (K); 5) Isoleucine (I), Leucine (L), Methionine (M), Valine (V); 6) Phenylalanine (F), Tyrosine (Y), Tryptophan (W); 7) Serine (S), Threonine (T); and [0139] 8) Cysteine (C), Methionine (M).

[0210] The terms “identical” or percent “identity,” in the context of two or more nucleic acids or polypeptide sequences, refer to two or more sequences or subsequences that are the same. Sequences are “substantially identical” if they have a percentage of amino acid residues or nucleotides that are the same (i.e., about 60% identity, about 65%, about 70%, about 75%, about 80%, about 85%, about 90%, about 95%, about 96%, about 97%, about 98%, or about 99% identity over a specified region), when compared and aligned for maximum correspondence over a comparison window, or designated region as measured using one of the following sequence comparison algorithms (or other algorithms available to persons of ordinary skill in the art) or by manual alignment and visual inspection. This definition also refers to the complement of a test sequence. The identity can exist over a region that is at least about 50 amino acids or nucleotides in length, or over a region that is 75-100 amino acids or nucleotides in length, or, where not specified, across the entire sequence of a polynucleotide or polypeptide. A polynucleotide encoding a polypeptide described herein, including homologs from species other than human, may be obtained by a process comprising the steps of screening a library under stringent hybridization conditions with a labeled probe having a polynucleotide sequence described herein or a fragment thereof, and isolating full-length cDNA and genomic clones containing said polynucleotide sequence. Such hybridization techniques are well known to the skilled artisan.

[0211] For sequence comparison, typically one sequence acts as a reference sequence, to which test sequences are compared. When using a sequence comparison algorithm, test and reference sequences are entered into a computer, subsequence coordinates are designated, if necessary, and sequence algorithm program parameters are designated. Default program parameters can be used, or alternative parameters can be designated. The sequence comparison algorithm then calculates the percent sequence identities for the test sequences relative to the reference sequence, based on the program parameters.

[0212] A “comparison window”, as used herein, includes reference to a segment of any one of the number of contiguous positions selected from the group consisting of from 20 to 600, usually about 50 to about 200, more usually about 100 to about 150 in which a sequence may be compared to a reference sequence of the same number of contiguous positions after the two sequences are optimally aligned. Methods of alignment of sequences for comparison are known to those of ordinary skill in the art. Optimal alignment of sequences for comparison can be conducted, including but not limited to, by the local homology algorithm of Smith and Waterman (1970) Adv. Appl. Math. 2:482c, by the homology alignment algorithm of Needleman and Wunsch (1970) J. Mol. Biol. 48:443, by the search for similarity method of Pearson and Lipman (1988) Proc. Nat'l. Acad. Sci. USA 85:2444, by computerized implementations of these algorithms (GAP, BESTFIT, FASTA, and TFASTA in the Wisconsin Genetics Software Package, Genetics Computer Group, 575 Science Dr., Madison, Wis.), or by manual alignment and visual inspection (see, e.g., Ausubel et al., Current Protocols in Molecular Biology (1995 supplement)).

[0213] One example of an algorithm that is suitable for determining percent sequence identity and sequence similarity are the BLAST and BLAST 2.0 algorithms, which are described in Altschul et al. (1997) Nuc. Acids Res. 25:3389-3402, and Altschul et al. (1990) J. Mol. Biol. 215:403-410, respectively. Software for performing BLAST analyses is publicly available through the National Center for Biotechnology Information available at the World Wide Web at ncbi.nlm.nih.gov. The BLAST algorithm parameters W, T, and X determine the sensitivity and speed of the alignment. The BLASTN program (for nucleotide sequences) uses as defaults a wordlength (W) of 11, an expectation (E) or 10, M=5, N=−4 and a comparison of both strands. For amino acid sequences, the BLASTP program uses as defaults a wordlength of 3, and expectation (E) of 10, and the BLOSUM62 scoring matrix (see Henikoff and Henikoff (1992) Proc. Natl. Acad. Sci. USA 89:10915) alignments (B) of 50, expectation (E) of 10, M=5, N=−4, and a comparison of both strands. The BLAST algorithm is typically performed with the “low complexity” filter turned off

[0214] The BLAST algorithm also performs a statistical analysis of the similarity between two sequences (see, e.g., Karlin and Altschul (1993) Proc. Natl. Acad. Sci. USA 90:5873-5787). One measure of similarity provided by the BLAST algorithm is the smallest sum probability (P(N)), which provides an indication of the probability by which a match between two nucleotide or amino acid sequences would occur by chance. For example, a nucleic acid is considered similar to a reference sequence if the smallest sum probability in a comparison of the test nucleic acid to the reference nucleic acid is less than about 0.2, or less than about 0.01, or less than about 0.001.

[0215] The phrase “selectively (or specifically) hybridizes to” refers to the binding, duplexing, or hybridizing of a molecule only to a particular nucleotide sequence under stringent hybridization conditions when that sequence is present in a complex mixture (including but not limited to, total cellular or library DNA or RNA).

[0216] The phrase “stringent hybridization conditions” refers to hybridization of sequences of DNA, RNA, or other nucleic acids, or combinations thereof under conditions of low ionic strength and high temperature as is known in the art. Typically, under stringent conditions a probe will hybridize to its target subsequence in a complex mixture of nucleic acid (including but not limited to, total cellular or library DNA or RNA) but does not hybridize to other sequences in the complex mixture. Stringent conditions are sequence-dependent and will be different in different circumstances. Longer sequences hybridize specifically at higher temperatures. An extensive guide to the hybridization of nucleic acids is found in Tijssen, Laboratory Techniques in Biochemistry and Molecular Biology-Hybridization with Nucleic Probes, “Overview of principles of hybridization and the strategy of nucleic acid assays” (1993).

[0217] As used herein, the terms “engineer, engineered, engineering”, are considered to include any manipulation of the peptide backbone or the post-translational modifications of a naturally occurring or recombinant polypeptide or fragment thereof. Engineering includes modifications of the amino acid sequence, of the glycosylation pattern, or of the side chain group of individual amino acids, as well as combinations of these approaches. The engineered proteins are expressed and produced by standard molecular biology techniques.

[0218] By “isolated nucleic acid molecule or polynucleotide” is intended a nucleic acid molecule, DNA or RNA, which has been removed from its native environment. For example, a recombinant polynucleotide encoding a polypeptide contained in a vector is considered isolated. Further examples of an isolated polynucleotide include recombinant polynucleotides maintained in heterologous host cells or purified (partially or substantially) polynucleotides in solution. An isolated polynucleotide includes a polynucleotide molecule contained in cells that ordinarily contain the polynucleotide molecule, but the polynucleotide molecule is present extra-chromosomally or at a chromosomal location that is different from its natural chromosomal location. Isolated RNA molecules include in vivo or in vitro RNA transcripts, as well as positive and negative strand forms, and double-stranded forms. Isolated polynucleotides or nucleic acids described herein, further include such molecules produced synthetically, e.g., via PCR or chemical synthesis. In addition, a polynucleotide or a nucleic acid, in certain embodiments, include a regulatory element such as a promoter, ribosome binding site, or a transcription terminator.

[0219] The term “polymerase chain reaction” or “PCR” generally refers to a method for amplification of a desired nucleotide sequence in vitro, as described, for example, in U.S. Pat. No. 4,683,195. In general, the PCR method involves repeated cycles of primer extension synthesis, using oligonucleotide primers capable of hybridising preferentially to a template nucleic acid.

[0220] By a nucleic acid or polynucleotide having a nucleotide sequence at least, for example, 95% “identical” to a reference nucleotide sequence of the present disclosure, it is intended that the nucleotide sequence of the polynucleotide is identical to the reference sequence except that the polynucleotide sequence may include up to five point mutations per each 100 nucleotides of the reference nucleotide sequence. In other words, to obtain a polynucleotide having a nucleotide sequence at least 95% identical to a reference nucleotide sequence, up to 5% of the nucleotides in the reference sequence may be deleted or substituted with another nucleotide, or a number of nucleotides up to 5% of the total nucleotides in the reference sequence may be inserted into the reference sequence. These alterations of the reference sequence may occur at the 5′ or 3′ terminal positions of the reference nucleotide sequence or anywhere between those terminal positions, interspersed either individually among residues in the reference sequence or in one or more contiguous groups within the reference sequence. As a practical matter, whether any particular polynucleotide sequence is at least 80%, 85%, 90%, 95%, 96%, 97%, 98% or 99% identical to a nucleotide sequence of the present disclosure can be determined conventionally using known computer programs, such as the ones discussed above for polypeptides (e.g. ALIGN-2).

[0221] A derivative, or a variant of a polypeptide is said to share “homology” or be “homologous” with the peptide if the amino acid sequences of the derivative or variant has at least 50% identity with a 100 amino acid sequence from the original peptide. In certain embodiments, the derivative or variant is at least 75% the same as that of either the peptide or a fragment of the peptide having the same number of amino acid residues as the derivative. In certain embodiments, the derivative or variant is at least 85% the same as that of either the peptide or a fragment of the peptide having the same number of amino acid residues as the derivative. In certain embodiments, the amino acid sequence of the derivative is at least 90% the same as the peptide or a fragment of the peptide having the same number of amino acid residues as the derivative. In some embodiments, the amino acid sequence of the derivative is at least 95%, 96%, 97%, or 98% the same as the peptide or a fragment of the peptide having the same number of amino acid residues as the derivative. In certain embodiments, the derivative or variant is at least 99% the same as that of either the peptide or a fragment of the peptide having the same number of amino acid residues as the derivative.

[0222] The term “modified,” as used herein refers to any changes made to a given polypeptide, such as changes to the length of the polypeptide, the amino acid sequence, chemical structure, co-translational modification, or post-translational modification of a polypeptide. The form “(modified)” term means that the polypeptides being discussed are optionally modified, that is, the polypeptides under discussion can be modified or unmodified.

[0223] In some aspects, a masked cytokine fusion protein construct comprises an amino acid sequence that is at least 80, 85, 90, 91, 92, 93, 94, 95, 96, 97, 98, 99, or 100% identical to a relevant amino acid sequence or fragment thereof set forth in the Table(s) or accession number(s) disclosed herein. In some aspects, a masked cytokine fusion protein comprises an amino acid sequence encoded by a polynucleotide that is at least 80, 85, 90, 91, 92, 93, 94, 95, 96, 97, 98, 99, or 100% identical to a relevant nucleotide sequence or fragment thereof set forth in the Table(s) or accession number(s) disclosed herein.

### Methods of Preparing Masked IL12 Fusion Proteins/Recombinant Proteins

[0224] The masked IL12 fusion proteins or other recombinant proteins (e.g., recombinant proteins comprising a PCL) described herein may be produced using standard recombinant methods known in the art (see, e.g., U.S. Pat. No. 4,816,567 and “Antibodies: A Laboratory Manual,” 2nd Edition, Ed. Greenfield, Cold Spring Harbor Laboratory Press, New York, 2014) and as further outlined herein.

[0225] Typically, for recombinant production of a masked IL12 fusion proteins or other recombinant proteins, nucleic acid encoding the masked IL12 fusion proteins or other recombinant proteins is isolated and inserted into one or more vectors for further cloning and/or expression in a host cell. Such nucleic acid may be readily isolated and sequenced using conventional procedures (e.g. by using oligonucleotide probes that are capable of binding specifically to genes masked IL12 fusion proteins or other recombinant proteins).

[0226] Suitable host cells for cloning or expression of masked IL12 fusion proteins or other recombinant proteins encoding vectors include prokaryotic or eukaryotic cells described herein.

[0227] A “recombinant host cell” or “host cell” refers to a cell that includes an exogenous polynucleotide, regardless of the method used for insertion, for example, direct uptake, transduction, f-mating, or other methods known in the art to create recombinant host cells. The exogenous polynucleotide may be maintained as a nonintegrated vector, for example, a plasmid, or alternatively, may be integrated into the host genome.

[0228] As used herein, the term “eukaryote” refers to organisms belonging to the phylogenetic domain Eucarya such as animals (including but not limited to, mammals, insects, reptiles and birds), ciliates, plants (including but not limited to, monocots, dicots and algae), fungi, yeasts, flagellates, microsporidia, protists, and the like.

[0229] As used herein, the term “prokaryote” refers to prokaryotic organisms. For example, a non-eukaryotic organism can belong to the Eubacteria (including but not limited to, Escherichia coli, Thermus thermophilus, Bacillus stearothermophilus, Pseudomonas fluorescens, Pseudomonas aeruginosa, Pseudomonas putida, and the like) phylogenetic domain, or the Archaea (including but not limited to, Methanococcus jannaschii, Methanobacterium thermoautotrophicum, Halobacterium such as Haloferax volcanii and Halobacterium species NRC-1, Archaeoglobus fulgidus, Pyrococcus furiosus, Pyrococcus horikoshii, Aeuropyrum pernix, and the like) phylogenetic domain.

[0230] For example, a masked IL12 fusion protein construct or other recombinant protein comprising a PCL construct described herein may be produced in bacteria, in particular when glycosylation and Fc effector function are not needed. For expression of polypeptides in bacteria, see, for example, U.S. Pat. Nos. 5,648,237, 5,789,199, and 5,840,523. (See also Charlton, Methods in Molecular Biology, Vol. 248 (B.K.C. Lo, ed., Humana Press, Totowa, N.J., 2003), pp. 245-254, describing expression of antibody fragments in E. coli.) After expression, the masked IL12 fusion protein or other recombinant protein as described herein may be isolated from the bacterial cell paste in a soluble fraction and can be further purified.

[0231] In addition to prokaryotes, eukaryotic microbes such as filamentous fungi or yeast are suitable cloning or expression hosts for multi-specific antigen-binding construct-encoding vectors, including fungi and yeast strains whose glycosylation pathways have been “humanized,” resulting in the production of an antigen-binding construct with a partially or fully human glycosylation pattern. See Gerngross, Nat. Biotech. 22:1409-1414 (2004), and Li et al., Nat. Biotech. 24:210-215 (2006).

[0232] Suitable host cells for the expression of glycosylated polypeptides are also derived from multicellular organisms (invertebrates and vertebrates). Examples of invertebrate cells include plant and insect cells. Numerous baculoviral strains have been identified which may be used in conjunction with insect cells, particularly for transfection of Spodoptera frugiperda cells.

[0233] Plant cell cultures can also be utilized as hosts. See, e.g., U.S. Pat. Nos. 5,959,177, 6,040,498, 6,420,548, 7,125,978, and 6,417,429 (describing PLANTIBODIES™ technology for producing recombinant proteins, in particular antigen-binding constructs, in transgenic plants).

[0234] Vertebrate cells may also be used as hosts. For example, mammalian cell lines that are adapted to grow in suspension may be useful. Other examples of useful mammalian host cell lines are monkey kidney CV1 line transformed by SV40 (COS-7); human embryonic kidney line (293 or 293 cells as described, e.g., in Graham et al., J. Gen Virol., 36:59 (1977)); baby hamster kidney cells (BHK); mouse sertoli cells (TM4 cells as described, e.g., in Mather, Biol Reprod, 23:243-251 (1980)); monkey kidney cells (CV1); African green monkey kidney cells (VERO-76); human cervical carcinoma cells (HELA); canine kidney cells (MDCK); buffalo rat liver cells (BRL 3A); human lung cells (W138); human liver cells (Hep G2); mouse mammary tumour (MMT 060562); TRI cells, as described, e.g., in Mather et al., Annals N.Y. Acad Sci, 383:44-68 (1982); MRC 5 cells; and FS4 cells. Other useful mammalian host cell lines include Chinese hamster ovary (CHO) cells, including DHFR—CHO cells (Urlaub et al., Proc Natl Acad Sci USA, 77:4216 (1980)); and myeloma cell lines such as YO, NSO and Sp2/0. For a review of certain mammalian host cell lines suitable for antigen-binding construct production, see, e.g., Yazaki & Wu, Methods in Molecular Biology, Vol. 248 (B.K.C. Lo, ed., Humana Press, Totowa, N.J.), pp. 255-268 (2003).

[0235] In some embodiments, the masked IL12 fusion proteins or other recombinant proteins described herein are produced in stable mammalian cells by a method comprising transfecting at least one stable mammalian cell with nucleic acid encoding the masked IL12 fusion protein or other recombinant protein described herein, in a predetermined ratio, and expressing the nucleic acid in the at least one mammalian cell. In some embodiments, the predetermined ratio of nucleic acid is determined in transient transfection experiments to determine the relative ratio of input nucleic acids that results in the highest percentage of the fusion proteins in the expressed product (see also Example section for Protocols 3 and 4 and Example 3).

[0236] In some embodiments, in the method of producing a masked IL12 fusion protein or other recombinant protein described herein, in stable mammalian cells, the expression product of the stable mammalian cell comprises a larger percentage of the desired masked HetFc IL12 fusion protein as compared to the monomeric fusion protein. In certain embodiments, the fusion proteins herein are glycosylated.

[0237] In some embodiments, in the method of producing a fusion protein in stable mammalian cells, the method further comprises identifying and purifying the desired fusion protein. In some embodiments, identification is by one or both of liquid chromatography and mass spectrometry (see also the Examples herein).

[0238] If required, the masked IL12 fusion proteins or other recombinant proteins can be purified or isolated after expression. Proteins may be isolated or purified in a variety of ways known to those skilled in the art. Standard purification methods include chromatographic techniques, including ion exchange, hydrophobic interaction, affinity, sizing or gel filtration, and reversed-phase, carried out at atmospheric pressure or at high pressure using systems such as FPLC and HPLC. Purification methods also include electrophoretic, immunological, precipitation, dialysis, and chromatofocusing techniques. Ultrafiltration and diafiltration techniques, in conjunction with protein concentration, are also useful. As is well known in the art, a variety of natural proteins bind Fc and antibodies, and these proteins can be used for purification of antigen-binding constructs. For example, the bacterial proteins A and G bind to the Fc region. Likewise, the bacterial protein L binds to the Fab region of some antibodies. Purification can often be enabled by a particular fusion partner. For example, antibodies may be purified using glutathione resin if a GST fusion is employed, Ni+2 affinity chromatography if a His-tag is employed, or immobilized anti-flag antibody if a flag-tag is used. For general guidance in suitable purification techniques, see, e.g., Protein Purification: Principles and Practice, 3rd Ed., Scopes, Springer-Verlag, N.Y. (1994). The degree of purification necessary will vary depending on the use of the antigen-binding constructs. In some instances, no purification may be necessary.

[0239] In certain embodiments, the masked IL12 fusion proteins or other recombinant proteins may be purified using Anion Exchange Chromatography including, but not limited to, chromatography on Q-sepharose, DEAE sepharose, poros HQ, poros DEAF, Toyopearl Q, Toyopearl QAE, Toyopearl DEAE, Resource/Source Q and DEAE, Fractogel Q or DEAE columns, or their equivalents or comparables.

[0240] In some embodiments, the masked IL12 fusion proteins or other recombinant proteins may be purified using Cation Exchange Chromatography including, but not limited to, chromatography on SP-sepharose, CM sepharose, poros HS, poros CM, Toyopearl SP, Toyopearl CM, Resource/Source S or CM, or Fractogel S or CM columns, or their equivalents or comparables.

[0241] In certain embodiments, the masked IL12 fusion proteins or other recombinant proteins herein are substantially pure. The term “substantially pure” (or “substantially purified”) refers to a construct described herein, or variant thereof, that may be substantially or essentially free of components that normally accompany or interact with the protein as found in its naturally occurring environment, i.e. a native cell, or host cell in the case of recombinantly produced construct. In certain embodiments, a construct that is substantially free of cellular material includes preparations of protein having less than about 30%, less than about 25%, less than about 20%, less than about 15%, less than about 10%, less than about 5%, less than about 4%, less than about 3%, less than about 2%, or less than about 1% (by dry weight) of contaminating protein. When the construct is recombinantly produced by the host cells, the protein in certain embodiments is present at about 30%, about 25%, about 20%, about 15%, about 10%, about 5%, about 4%, about 3%, about 2%, or about 1% or less of the dry weight of the cells. When the construct is recombinantly produced by the host cells, the protein, in certain embodiments, is present in the culture medium at about 5 g/L, about 4 g/L, about 3 g/L, about 2 g/L, about 1 g/L, about 750 mg/L, about 500 mg/L, about 250 mg/L, about 100 mg/L, about 50 mg/L, about 10 mg/L, or about 1 mg/L or less.

[0242] In certain embodiments, the term “substantially purified” as applied to a masked HetFc IL12 fusion protein comprising a heterodimeric Fc as described herein means that the heterodimeric Fc has a purity level of at least about 30%, at least about 35%, at least about 40%, at least about 45%, at least about 50%, at least about 55%, at least about 60%, at least about 65%, at least about 70%, specifically, a purity level of at least about 75%, 80%, 85%, and more specifically, a purity level of at least about 90%, a purity level of at least about 95%, a purity level of at least about 99% or greater as determined by appropriate methods such as SDS/PAGE analysis, RP-HPLC, size-exclusion chromatography (SEC) and capillary electrophoresis.

[0243] The masked IL12 fusion proteins and other recombinant proteins may also be chemically synthesized using techniques known in the art (see, e.g., Creighton, Proteins: Structures and Molecular Principles, W. H. Freeman & Co., N.Y. (1983), and Hunkapiller et al., Nature, 310:105-111 (1984)). For example, a polypeptide corresponding to a fragment of a polypeptide can be synthesized by use of a peptide synthesizer. Furthermore, if desired, nonclassical amino acids or chemical amino acid analogs can be introduced as a substitution or addition into the polypeptide sequence. Non-classical amino acids include, but are not limited to, to the D-isomers of the common amino acids, 2,4-diaminobutyric acid, alpha-amino isobutyric acid, 4aminobutyric acid, Abu, 2-amino butyric acid, g-Abu, e-Ahx, 6-amino hexanoic acid, Aib, 2-amino isobutyric acid, 3-amino propionic acid, ornithine, norleucine, norvaline, hydroxyproline, sarcosine, citrulline, homocitrulline, cysteic acid, t-butylglycine, t-butylalanine, phenylglycine, cyclohexylalanine, β-alanine, fluoro-amino acids, designer amino acids such as α-methyl amino acids, C α-methyl amino acids, N α-methyl amino acids, and amino acid analogs in general. Furthermore, the amino acid can be D (dextrorotary) or L (levorotary)

[0244] Certain embodiments of the present disclosure relate to isolated nucleic acid encoding a masked HetFc IL12 fusion protein or other recombinant protein described herein. Such nucleic acid may encode an amino acid sequence comprising the VL and/or an amino acid sequence comprising the VH of the MM, or a modified IL12 polypeptide, etc.

[0245] Certain embodiments relate to vectors (e.g. expression vectors) comprising nucleic acid encoding a masked HetFc IL12 fusion protein or other recombinant protein described herein. The nucleic acid may be comprised by a single vector or it may be comprised by more than one vector. In some embodiments, the nucleic acid is comprised by a multicistronic vector.

[0246] Certain embodiments relate to host cells comprising such nucleic acid or one or more vectors comprising the nucleic acid. In some embodiments, a host cell comprises (e.g. has been transformed with) a vector comprising a nucleic acid that encodes an amino acid sequence comprising a first fusion protein as described herein (e.g., a first Fc polypeptide fused to a MM etc.) and an amino acid sequence comprising a second fusion protein as described herein (e.g., a second Fc polypeptide fused to an IL12 or IL23 polypeptide). In some embodiments, a host cell comprises (e.g. has been transformed with) a first vector comprising a nucleic acid that encodes an amino acid sequence comprising a first fusion protein as described herein (e.g., a first Fc polypeptide fused to a MM) and a second vector comprising a nucleic acid that encodes an amino acid sequence comprising a second fusion protein as described herein (e.g., a second Fc polypeptide fused to an IL12 or IL23 polypeptide). In some embodiments, the host cell is eukaryotic, e.g. a Chinese Hamster Ovary (CHO) cell, or human embryonic kidney (HEK) cell, or lymphoid cell (e.g. YO, NSO, Sp20 cell).

[0247] Certain embodiments relate to a method of making a masked IL12 fusion protein by culturing a host cell into which nucleic acid encoding the fusion protein has been introduced, under conditions suitable for expression of the masked IL12 fusion protein, and optionally recovering the masked IL12 fusion protein from the host cell (or host cell culture medium).

### Post-Translational Modifications

[0248] In certain embodiments, the masked IL12 fusion proteins described herein may be differentially modified during or after translation.

[0249] The term “modified,” as used herein, refers to any changes made to a given polypeptide, such as changes to the length of the polypeptide, the amino acid sequence, chemical structure, co-translational modification, or post-translational modification of a polypeptide.

[0250] The term “post-translationally modified” refers to any modification of a natural or non-natural amino acid that occurs to such an amino acid after it has been incorporated into a polypeptide chain. The term encompasses, by way of example only, co-translational in vivo modifications, co-translational in vitro modifications (such as in a cell-free translation system), post-translational in vivo modifications, and post-translational in vitro modifications.

[0251] In some embodiments, the masked IL12 fusion proteins may comprise a modification such as glycosylation, acetylation, phosphorylation, amidation, derivatization by known protecting/blocking groups, proteolytic cleavage or linkage to an antibody molecule or antigen-binding construct or other cellular ligand, or a combination of these modifications. In some embodiments, the masked IL12 fusion proteins may be chemically modified by known techniques including, but not limited to, specific chemical cleavage by cyanogen bromide, trypsin, chymotrypsin, papain, V8 protease or NaBH4; acetylation; formylation; oxidation; reduction or metabolic synthesis in the presence of tunicamycin.

[0252] Additional optional post-translational modifications of masked IL12 fusion proteins or portions thereof, terminal ends, attachment of chemical moieties to the amino acid backbone, chemical modifications of N-linked or O-linked carbohydrate chains, and addition or deletion of an N-terminal methionine residue as a result of prokaryotic host cell expression. The masked IL12 fusion proteins described herein may optionally be modified with a detectable label, such as an enzymatic, fluorescent, isotopic or affinity label to allow for detection and isolation of the protein. Examples of suitable enzyme labels include horseradish peroxidase, alkaline phosphatase, beta-galactosidase, or acetylcholinesterase; examples of suitable prosthetic group complexes include streptavidin/biotin and avidin/biotin; examples of suitable fluorescent materials include umbelliferone, fluorescein, fluorescein isothiocyanate, rhodamine, dichlorotriazinylamine fluorescein, dansyl chloride or phycoerythrin; an example of a luminescent material includes luminol; examples of bioluminescent materials include luciferase, luciferin or aequorin; and examples of suitable radioactive materials include iodine, carbon, sulfur, tritium, indium, technetium, thallium, gallium, palladium, molybdenum, xenon or fluorine.

[0253] In some embodiments, the masked IL12 fusion proteins described herein may be attached to macrocyclic chelators that associate with radiometal ions.

[0254] In those embodiments in which the masked IL12 fusion proteins are modified, either by natural processes, such as post-translational processing, or by chemical modification techniques, the same type of modification may optionally be present in the same or varying degrees at several sites in a given polypeptide. Modifications include acetylation, acylation, ADP-ribosylation, amidation, covalent attachment of flavin, covalent attachment of a heme moiety, covalent attachment of a nucleotide or nucleotide derivative, covalent attachment of a lipid or lipid derivative, covalent attachment of phosphatidylinositol, cross-linking, cyclization, disulfide bond formation, demethylation, formation of covalent cross-links, formation of cysteine, formation of pyroglutamate, formylation, gamma-carboxylation, glycosylation, GPI anchor formation, hydroxylation, iodination, methylation, myristylation, oxidation, pegylation, proteolytic processing, phosphorylation, prenylation, racemization, selenoylation, sulfation, transfer-RNA mediated addition of amino acids to proteins such as arginylation, and ubiquitination (see, e.g., Proteins-Structure and Molecular Properties, 2nd Ed., T. E. Creighton, W. H. Freeman and Company, New York (1993); Post-Translational Covalent Modification of Proteins, B. C. Johnson, Ed., Academic Press, New York, pgs. 1-12 (1983); Seifter et al., Meth. Enzymol. 182:626-646 (1990); Rattan et al., Ann. N.Y. Acad. Sci. 663:48-62 (1992)).

[0255] In certain embodiments, the masked IL12 fusion proteins may be attached to a solid support, which may be particularly useful for immunoassays or purification of polypeptides that are bound by, or bind to, or associate with proteins described herein. Such solid supports include, but are not limited to, glass, cellulose, polyacrylamide, nylon, polystyrene, polyvinyl chloride or polypropylene.

### Pharmaceutical Compositions

[0256] Also provided herein are pharmaceutical compositions comprising a masked IL12 fusion protein described herein. Pharmaceutical compositions comprise the masked IL12 fusion protein and a pharmaceutically acceptable carrier.

[0257] The term “pharmaceutically acceptable” means approved by a regulatory agency of the Federal or a state government or listed in the U.S. Pharmacopeia or other generally recognized pharmacopeia for use in animals, and more particularly in humans. The term “carrier” refers to a diluent, adjuvant, excipient, or vehicle with which the therapeutic is administered. Such pharmaceutical carriers can be sterile liquids, such as water and oils, including those of petroleum, animal, vegetable or synthetic origin, such as peanut oil, soybean oil, mineral oil, sesame oil and the like. In some aspects, the carrier is a man-made carrier not found in nature. Water can be used as a carrier when the pharmaceutical composition is administered intravenously. Saline solutions and aqueous dextrose and glycerol solutions can also be employed as liquid carriers, particularly for injectable solutions. Suitable pharmaceutical excipients include starch, glucose, lactose, sucrose, gelatin, malt, rice, flour, chalk, silica gel, sodium stearate, glycerol monostearate, talc, sodium chloride, dried skim milk, glycerol, propylene, glycol, water, ethanol and the like. The composition, if desired, can also contain minor amounts of wetting or emulsifying agents, or pH buffering agents. These compositions can take the form of solutions, suspensions, emulsion, tablets, pills, capsules, powders, sustained-release formulations and the like. The composition can be formulated as a suppository, with traditional binders and carriers such as triglycerides. Oral formulation can include standard carriers such as pharmaceutical grades of mannitol, lactose, starch, magnesium stearate, sodium saccharine, cellulose, magnesium carbonate, etc. Examples of suitable pharmaceutical carriers are described in “Remington's Pharmaceutical Sciences” by E. W. Martin. Such compositions will contain a therapeutically effective amount of the bispecific anti-HER2 antigen-binding construct, preferably in purified form, together with a suitable amount of carrier so as to provide the form for proper administration to the patient. The formulation should suit the mode of administration.

[0258] In certain embodiments, the composition comprising a masked IL12 fusion protein is formulated in accordance with routine procedures as a pharmaceutical composition adapted for intravenous administration to human beings. Typically, compositions for intravenous administration are solutions in sterile isotonic aqueous buffer. Where necessary, the composition may also include a solubilizing agent and a local anesthetic such as lignocaine to ease pain at the site of the injection. Generally, the ingredients are supplied either separately or mixed together in unit dosage form, for example, as a dry lyophilized powder or water free concentrate in a hermetically sealed container such as an ampoule or sachette indicating the quantity of active agent. Where the composition is to be administered by infusion, it can be dispensed with an infusion bottle containing sterile pharmaceutical grade water or saline. Where the composition is administered by injection, an ampoule of sterile water for injection or saline can be provided so that the ingredients may be mixed prior to administration.

[0259] In certain embodiments, the compositions described herein are formulated as neutral or salt forms. Pharmaceutically acceptable salts include those formed with anions such as those derived from hydrochloric, phosphoric, acetic, oxalic, tartaric acids, etc., and those formed with cations such as those derived from sodium, potassium, ammonium, calcium, ferric hydroxide isopropylamine, triethylamine, 2-ethylamino ethanol, histidine, procaine, etc.

### Methods of Use

[0260] The present disclosure provides methods of using the masked IL12 fusion proteins and other recombinant fusion proteins comprising the PCL described herein.

[0261] In particular, further provided herein are methods of treating a subject with or at risk of developing cancer, autoimmune disease, inflammatory disorders or an infectious disease. Further provided herein are methods of treating a subject with or at risk of developing a disease selected from the group consisting of: all types of cancers, such as, but not limited to breast, including by way of non-limiting example, triple negative breast cancer, ER/PR+breast cancer, and Her2+ breast cancer, lung cancer (e.g., non-small cell squamous and adenocarcinoma), colorectal cancer, gastric cancer, glioblastoma, ovarian cancer, endometrial cancer, renal cancer, sarcoma, skin cancer, cervical cancer, liver cancer, bladder cancer, cholangiocarcinoma, prostate cancer, melanomas, head and neck cancer (e.g., head and neck squamous cell carcinoma), esophageal, squamous cell cancer, basal cell carcinoma, pancreatic cancer, leukemias, including T-cell acute lymphoblastic leukemia (T-ALL), lymphoblastic diseases including multiple myeloma, solid tumors, bone disease or metastasis in cancer, regardless of primary tumor origin. Further provided are methods of treating a subject with or at risk of developing rheumatoid arthritis, Crohn's disease, SLE, cardiovascular damage, or ischemia.

[0262] In certain embodiments, the present disclosure provides methods of treating a disease in a subject by administering to the subject a therapeutically effective amount of a masked cytokine fusion protein disclosed herein where the disease is selected from the group consisting of colorectal cancer, pancreatic cancer, head and neck cancer, esophageal cancer, bladder cancer, cervical cancer, and lung cancer (e.g., non-small cell squamous and adenocarcinoma).

[0263] The methods comprise administering to the subject in need thereof an effective amount of a masked IL12 fusion protein or other recombinant fusion protein as described herein (e.g., comprising a PCL) (a fusion protein) as disclosed herein that is typically administered as a pharmaceutical composition. In some embodiments, the method further comprises selecting a subject with or at risk of developing cancer. In some embodiments, the pharmaceutical composition comprises a masked IL12 fusion protein, or a fragment thereof that is activated at a tumor site. In one embodiment, the tumor is a solid tumor.

[0264] In certain embodiments, provided is a method of treating a cancer comprising administering to a subject in which such treatment, prevention or amelioration is desired, a masked IL12 fusion protein described herein, in an amount effective to treat, prevent or ameliorate the cancer. In other embodiments, there is provided a method of using the masked IL12 fusion protein described herein in the preparation of a medicament for the treatment, prevention, or amelioration of cancer in a subject.

[0265] The term “subject” refers to an animal, in some embodiments a mammal, which is the object of treatment, observation or experiment. An animal may be a human, a non-human primate, a companion animal (e.g., dogs, cats, and the like), farm animal (e.g., cows, sheep, pigs, horses, and the like) or a laboratory animal (e.g., rats, mice, guinea pigs, and the like).

[0266] The term “mammal” as used herein includes but is not limited to humans, non-human primates, canines, felines, murines, bovines, equines, and porcines.

[0267] “Treatment” refers to clinical intervention in an attempt to alter the natural course of the individual or cell being treated and can be performed either for prophylaxis or during the course of clinical pathology. Desirable effects of treatment include preventing occurrence or recurrence of disease, alleviation of symptoms, diminishing of any direct or indirect pathological consequences of the disease, preventing metastasis, decreasing the rate of disease progression, amelioration or palliation of the disease state, and remission or improved prognosis. In some embodiments, masked IL12 fusion protein described herein are used to delay development of a disease or disorder. In one embodiment, masked IL12 fusion protein described herein and methods described herein effect tumor regression. In one embodiment, masked IL12 fusion protein described herein and methods described herein effect inhibition of tumor/cancer growth.

[0268] Desirable effects of treatment include, but are not limited to, one or more of preventing occurrence or recurrence of disease, alleviation of symptoms, diminishment of any direct or indirect pathological consequences of the disease, preventing metastasis, decreasing the rate of disease progression, amelioration or palliation of the disease state, improved survival, and remission or improved prognosis. In some embodiments, masked IL12 fusion protein described herein are used to delay development of a disease or to slow the progression of a disease.

[0269] The term “effective amount” as used herein refers to that amount of a masked IL12 fusion protein described herein or a composition comprising a masked IL12 fusion protein described herein being administered, which will accomplish the goal of the recited method, e.g., relieve to some extent one or more of the symptoms of the disease, condition or disorder being treated. The amount of the composition described herein which will be effective in the treatment, inhibition and prevention of a disease or disorder associated with aberrant expression and/or activity of a therapeutic protein can be determined by standard clinical techniques. In addition, in vitro assays may optionally be employed to help identify optimal dosage ranges. The precise dose to be employed in the formulation will also depend on the route of administration, and the seriousness of the disease or disorder, and should be decided according to the judgment of the practitioner and each patient's circumstances. Effective doses are extrapolated from dose-response curves derived from in vitro or animal model test systems.

[0270] The masked IL12 fusion protein described herein is administered to a subject. Various delivery systems are known and can be used to administer a masked IL12 fusion protein formulation described herein, e.g., encapsulation in liposomes, microparticles, microcapsules, recombinant cells capable of expressing the compound, receptor-mediated endocytosis (see, e.g., Wu and Wu, J. Biol. Chem. 262:4429-4432 (1987)), construction of a nucleic acid as part of a retroviral or other vector, etc. Methods of introduction include but are not limited to intradermal, intramuscular, intraperitoneal, intravenous, subcutaneous, intratumoral, intranasal, epidural, and oral routes. The compounds or compositions may be administered by any convenient route, for example by infusion or bolus injection, by absorption through epithelial or mucocutaneous linings (e.g., oral mucosa, rectal and intestinal mucosa, etc.) and may be administered together with other biologically active agents. Administration can be systemic or local. In addition, in certain embodiments, it is desirable to introduce the masked IL12 fusion protein compositions described herein into the central nervous system by any suitable route, including intraventricular and intrathecal injection; intraventricular injection may be facilitated by an intraventricular catheter, for example, attached to a reservoir, such as an Ommaya reservoir. Pulmonary administration can also be employed, e.g., by use of an inhaler or nebulizer, and formulation with an aerosolizing agent.

[0271] In a specific embodiment, it is desirable to administer the masked IL12 fusion proteins described herein, or compositions described herein, locally to the area in need of treatment; this may be achieved by, for example, and not by way of limitation, local infusion during surgery, topical application, e.g., in conjunction with a wound dressing after surgery, by injection, by means of a catheter, by means of a suppository, or by means of an implant, said implant being of a porous, non-porous, or gelatinous material, including membranes, such as sialastic membranes, or fibers. Preferably, when administering a protein, including a masked IL12 fusion protein described herein, care must be taken to use materials to which the protein does not absorb.

[0272] In another embodiment, the masked IL12 fusion proteins described herein or composition comprising same can be delivered in a vesicle, in particular a liposome (see Langer, Science 249:1527-1533 (1990); Treat et al., in Liposomes in the Therapy of Infectious Disease and Cancer, Lopez-Berestein and Fidler (eds.), Liss, New York, pp. 353-365 (1989); Lopez-Berestein, ibid., pp. 317-327; see generally ibid.).

[0273] In yet another embodiment, a masked IL12 fusion protein described herein or composition can be delivered in a controlled release system. In one embodiment, a pump may be used (see Langer, supra; Sefton, CRC Crit. Ref. Biomed. Eng. 14:201 (1987); Buchwald et al., Surgery 88:507 (1980); Saudek et al., N. Engl. J. Med. 321:574 (1989)). In another embodiment, polymeric materials can be used (see Medical Applications of Controlled Release, Langer and Wise (eds.), CRC Pres., Boca Raton, Fla. (1974); Controlled Drug Bioavailability, Drug Product Design and Performance, Smolen and Ball (eds.), Wiley, New York (1984); Ranger and Peppas, J., Macromol.

[0274] Sci. Rev. Macromol. Chem. 23:61 (1983); see also Levy et al., Science 228:190 (1985); During et al., Ann. Neurol. 25:351 (1989); Howard et al., J. Neurosurg. 71:105 (1989)). In yet another embodiment, a controlled release system can be placed in proximity of the therapeutic target, e.g., the brain, thus requiring only a fraction of the systemic dose (see, e.g., Goodson, in Medical Applications of Controlled Release, vol. 2, pp. 115-138 (1984)).

[0275] In a specific embodiment comprising a nucleic acid encoding a masked IL12 fusion protein described herein, the nucleic acid can be administered in vivo to promote expression of its encoded protein, by constructing it as part of an appropriate nucleic acid expression vector and administering it so that it becomes intracellular, e.g., by use of a retroviral vector (see U.S. Pat. No. 4,980,286), or by direct injection, or by use of microparticle bombardment (e.g., a gene gun; Biolistic, Dupont), or coating with lipids or cell-surface receptors or transfecting agents, or by administering it in linkage to a homeobox-like peptide which is known to enter the nucleus (see e.g., Joliot et al., Proc. Natl. Acad. Sci. USA 88:1864-1868 (1991)), etc. Alternatively, a nucleic acid can be introduced intracellularly and incorporated within host cell DNA for expression, by homologous recombination.

[0276] The masked IL12 fusion proteins described herein may be administered alone or in combination with other types of treatments (e.g., radiation therapy, chemotherapy, hormonal therapy, immunotherapy, immune checkpoint inhibitors, and anti-tumor agents). Generally, administration of products of a species origin or species reactivity (in the case of antibodies) that is the same species as that of the patient is preferred.

[0277] The masked IL12 fusion proteins described herein may be used in the treatment of cancer. In some embodiments, the masked IL12 fusion proteins described herein may be used in the treatment of a patient who has undergone one or more alternate forms of anti-cancer therapy. In some embodiments, the patient has relapsed or failed to respond to one or more alternate forms of anti-cancer therapy. In other embodiments, a masked IL12 fusion protein is administered to a patient in combination with one or more alternate forms of anti-cancer therapy. In other embodiments, the masked IL12 fusion protein is administered to a patient that has become refractory to treatment with one or more alternate forms of anti-cancer therapy.

### Kits and Articles of Manufacture

[0278] Also described herein are kits comprising one or more masked IL12 fusion protein or other recombinant protein described herein. Individual components of the kit would be packaged in separate containers and, associated with such containers, can be a notice in the form prescribed by a governmental agency regulating the manufacture, use or sale of pharmaceuticals or biological products, which notice reflects approval by the agency of manufacture, use or sale. The kit may optionally contain instructions or directions outlining the method of use or administration regimen for the masked IL12 fusion proteins.

[0279] When one or more components of the kit are provided as solutions, for example an aqueous solution, or a sterile aqueous solution, the container means may itself be an inhalant, syringe, pipette, eye dropper, or other such like apparatus, from which the solution may be administered to a subject or applied to and mixed with the other components of the kit.

[0280] The components of the kit may also be provided in dried or lyophilized form and the kit can additionally contain a suitable solvent for reconstitution of the lyophilized components. Irrespective of the number or type of containers, the kits described herein also may comprise an instrument for assisting with the administration of the composition to a patient. Such an instrument may be an inhalant, nasal spray device, syringe, pipette, forceps, measured spoon, eye dropper or similar medically approved delivery vehicle.

[0281] Certain embodiments relate to an article of manufacture containing materials useful for treatment of a patient as described herein. The article of manufacture comprises a container and a label or package insert on or associated with the container. Suitable containers include, for example, bottles, vials, syringes, intravenous solution bags, etc. The containers may be formed from a variety of materials such as glass or plastic. The container holds a composition comprising the masked IL12 fusion protein which is by itself or combined with another composition effective for treating the patient and may have a sterile access port (for example the container may be an intravenous solution bag or a vial having a stopper pierceable by a hypodermic injection needle). The label or package insert indicates that the composition is used for treating the condition of choice. In some embodiments, the article of manufacture may comprise (a) a first container with a composition contained therein, wherein the composition comprises a masked IL12 fusion protein described herein; and (b) a second container with a composition contained therein, wherein the composition in the second container comprises a further cytotoxic or otherwise therapeutic agent. In such embodiments, the article of manufacture may further comprise a package insert indicating that the compositions can be used to treat a particular condition. Alternatively, or additionally, the article of manufacture may further comprise a second (or third) container comprising a pharmaceutically acceptable buffer, such as bacteriostatic water for injection (BWFI), phosphate-buffered saline, Ringer's solution and dextrose solution. The article of manufacture may optionally further include other materials desirable from a commercial and user standpoint, including other buffers, diluents, filters, needles, and syringes.

### Exemplary Embodiments

[0282] Further particular embodiments of the present disclosure are described as follows.

[0283] These embodiments are intended to illustrate the compositions and methods described in the present disclosure and are not intended to limit the scope of the present disclosure.

[0284] 1. A masked interleukin 12 (IL12) fusion protein, comprising an Fc domain comprising a first Fc polypeptide and a second Fc polypeptide; a masking moiety (MM); and an IL12 polypeptide; wherein the masking moiety is fused to the first Fc polypeptide by a first linker; and optionally, wherein the masking moiety further comprises a second linker; wherein the IL12 polypeptide is fused to the second Fc polypeptide by a third linker; wherein at least one of the first, second or third linkers is protease cleavable; and wherein the IL12 activity of the masked IL12 fusion protein is attenuated as compared to the IL12 activity of the IL12 containing polypeptide released after cleavage of the at least one protease cleavable linker.

[0285] 2. The masked IL12 fusion protein of embodiment 1, wherein the first linker is protease cleavable and optionally, the second linker is protease cleavable. 3. The masked IL12 fusion protein of embodiment 1, wherein the third linker is protease cleavable and optionally, the first or second linker is protease cleavable, or both. 4. The masked IL12 fusion protein of embodiment 1, wherein the first linker comprises a cleavage sequence selected from the group consisting of the cleavage sites listed in Table 3 and Table 24. 5. The masked IL12 fusion protein of embodiment 1, wherein the first linker comprises a cleavage sequence having the amino acid sequence MSGRSANA (SEQ ID NO:10). 6. The masked IL12 fusion protein of embodiment 1, wherein the protease cleavable linker is cleaved by a protease selected from the group consisting of a matrix metalloproteinase (MMP), a matriptase, a cathepsin, a kallikrein, a caspase, a serine protease, and an elastase. 7. The masked IL12 fusion protein of embodiment 1 wherein the first, second and third linkers are cleaved by the same protease.

[0286] 8. The masked IL12 fusion protein of embodiment 1, wherein the masking moiety is a single-chain Fv (scFv) antibody fragment, an IL12 receptor β2 subunit (IL12Rβ2) or an IL12-binding fragment thereof, or an IL12 receptor 131 subunit (IL12Rβ1) or an IL12-binding fragment thereof 9. The masked IL12 fusion protein of embodiment 8, wherein the scFv comprises the VHCDR1-3 having the amino acid sequences set forth in SEQ ID NO:β-15, respectively and the VLCDR1-3 having the amino acid sequence set forth in SEQ ID NO: 16-18, respectively. 10. The masked IL12 fusion protein of embodiment 8, wherein the scFv comprises a VH and VL comprising the amino acid sequence set forth in SEQ ID NOs:11 and 12, respectively; or a VH and VL comprising the amino acid sequence set forth in SEQ ID NOs:255 and 256, respectively. 11. The masked IL12 fusion protein of embodiment 8, wherein the scFv comprises a variant of the VH having the amino acid sequence set forth in SEQ ID NO:11 wherein the variant is selected from the group consisting of H_Y32A; H_F27V; H_Y52AV; H_R52E; H_R52E_Y52AV; H_H95D; H_G96T; and H_H98A, according to Kabat numbering; and the VL having the amino acid sequence set forth in SEQ ID NO: 12. 12. The masked IL12 fusion protein of embodiment 8, wherein the masking moiety is selected from an ECD of human IL12Rβ2, amino acids 24-321 of human Th12Rβ2 (IL12Rβ224-321), amino acids 24-124 of human Th12Rβ2 (IL12Rβ24-124), amino acids 24-240 of human IL12Rβ1 (IL12Rβ124-240) and an IL23R ECD.

[0287] 13. The masked IL12 fusion protein of embodiment 1, wherein the IL12 polypeptide comprises the amino acid sequence set forth in SEQ ID NO:22 or 23. 14. The masked IL12 fusion protein of embodiment 13, wherein the IL12 polypeptide comprises the p40 polypeptide amino acid sequence set forth in SEQ ID NO:22 and the p35 IL12 polypeptide is non-covalently bound to the p40 polypeptide. 15. The masked IL12 fusion protein of embodiment 13, wherein the IL12 polypeptide comprises the p35 polypeptide amino acid sequence set forth in SEQ ID NO:23 and the p40 IL12 polypeptide is non-covalently bound to the p40 polypeptide.

[0288] 16. The masked IL12 fusion protein of embodiment 1, wherein the IL12 polypeptide is a single chain IL12 polypeptide selected from a single chain IL12 polypeptide having the orientation p35-linker-p40 or p40-linker-p35. 17. The masked IL12 fusion protein of embodiment 16, wherein the fusion protein is selected from variants 29243, 29244, 31277, 32039, 32042, 32045, and 32454. 18. The masked IL12 fusion protein of embodiment 16, wherein the single chain IL12 polypeptide is a p40-linker-p35 polypeptide that is fused to the second Fc polypeptide at the p40 polypeptide. 19. The masked IL12 fusion protein of embodiment 16, wherein the single chain IL12 polypeptide is a p35-linker-p40 polypeptide that is fused to the second Fc polypeptide at the p35 polypeptide. 20. The masked IL12 fusion protein of embodiment 18 or embodiment 19, wherein the single chain IL12 polypeptide is fused to the c-terminal end of the second Fc polypeptide. 21. The masked IL12 fusion protein of embodiment 18 or embodiment 19, wherein the single chain IL12 polypeptide is fused to the c-terminal end of the second Fc polypeptide and the masking moiety is fused to the c-terminal end of the first Fc polypeptide. 22. The masked IL12 fusion protein of embodiment 18 or embodiment 19, wherein the single chain IL12 polypeptide is fused to the second Fc polypeptide and wherein the third linker is protease cleavable. 23. The masked IL12 fusion protein of embodiment 18 or embodiment 19, wherein the P40 domain of the IL12 polypeptide has been modified to be more resistant to proteolytic cleavage as compared to an unmodified P40 domain. 24. The masked IL12 fusion protein of embodiment 20, wherein the masking moiety is a single-chain Fv (scFv) antibody fragment; and wherein the IL12 fusion protein further comprises a second masking moiety comprising an additional scFv fused by a fourth linker to the p35 domain of the IL12 polypeptide. 25. The masked IL12 fusion protein of embodiment 24, wherein the first and fourth linkers are protease cleavable. 26. The masked IL12 fusion protein of embodiment 20, wherein the masking moiety comprises a first scFv fused to a second scFv by a fourth linker. 27. The masked IL12 fusion protein of embodiment 26, wherein the first and fourth linkers are protease cleavable. 28. The masked IL12 fusion protein of embodiment 27, wherein the masking moiety is in the following orientation: first Fc polypeptide-L1-VH-VL-L4-VH-VL; or first Fc polypeptide-L1-VH-VL-L4-VL-VH. 29. The masked IL12 fusion protein of embodiment 28, wherein the first and fourth linkers are protease cleavable.

[0289] 30. The masked IL12 fusion protein of embodiment 1, wherein the masking moiety comprises an IL12 receptor β2 subunit (IL2Rβ2) or an IL12-binding fragment thereof, and an IL12 receptor 131 subunit (IL2Rβ1) or an IL12-binding fragment thereof, fused by the second linker. 31. The masked IL12 fusion protein of embodiment 30, wherein the masking moiety comprises an IL12Rβ2-Ig domain fused to the c-terminal end of the first Fc polypeptide and the IL12Rβ1 fused by the second linker to the c-terminal end of the IL12Rβ2-Ig domain. 32. The masked IL12 fusion protein of embodiment 31, wherein the first and the second linker are protease cleavable.

[0290] 33. The masked IL12 fusion protein of embodiment 20, wherein the masking moiety is an IL12Rβ1 or an IL12-binding fragment thereof; and wherein the IL12 fusion protein further comprises a second masking moiety comprising an IL12Rβ2 or an IL12-binding fragment thereof fused by a fourth linker to the p35 domain of the IL12 polypeptide. 34. The masked IL12 fusion protein of embodiment 33, wherein the first and the fourth linker are protease cleavable. 35. The masked IL12 fusion protein of embodiment 1 further comprising a targeting domain. 36. The masked IL12 fusion protein of embodiment 35 wherein the targeting domain specifically binds a tumor-associated antigen.

[0291] 37. The masked IL12 fusion protein of embodiment 1 wherein the first Fc polypeptide comprises a first CH3 domain and the second Fc polypeptide comprises a second CH3 domain. 38. The masked IL12 fusion protein of embodiment 1 wherein the IL12 activity is determined by measuring relative cell abundance or cytokine production of a cell or a cell line that is sensitive to IL12. 39. The masked IL12 fusion protein of embodiment 38 wherein the cell or cell line is selected from PBMC, CD8+ T cells, a CTLL-2 cell line and an NK cell line. 40. The masked IL12 fusion protein of embodiment 38 wherein the IL12 activity is determined by measuring IFNγ release by CD8+ T cells. 41. The masked IL12 fusion protein of embodiment 38 wherein the IL12 activity is determined by measuring the relative cell abundance of NK cells. 42. The masked IL12 fusion protein of embodiment 36 wherein the first CH3 domain or the second CH3 domain or both comprise an asymmetric amino acid modification wherein the first and second CH3 domain preferentially pair to form a heterodimer rather than a homodimer.

[0292] 43. A masked interleukin 12 (IL12) fusion protein, comprising: an Fc domain comprising a first Fc polypeptide and a second Fc polypeptide; a masking moiety (MM); and an IL12 polypeptide; wherein the masking moiety is fused to the first Fc polypeptide by a first linker; and optionally, wherein the masking moiety further comprises a second linker; wherein the IL12 polypeptide is fused to the second Fc polypeptide by a third linker; optionally, wherein at least one of the first, second or third linkers is protease cleavable; and wherein the IL12 activity of the masked IL12 fusion protein is attenuated as compared to the IL12 activity of a control IL12 polypeptide.

[0293] 44. A masked IL12 fusion protein, comprising: an Fc domain comprising a first Fc polypeptide and a second Fc polypeptide; a first MM and a second MM; and an IL12 polypeptide; wherein the IL12 polypeptide comprises a p35 polypeptide and a p40 polypeptide; wherein the first MM is fused to the first Fc polypeptide by a first linker; wherein the p35 polypeptide is fused to the first MM by a second linker; wherein the second MM is fused to the second Fc polypeptide by a third linker; and wherein the p40 polypeptide is non-covalently bound to the p35 polypeptide; and wherein at least one of the first, second or third linkers is protease cleavable; and wherein the IL12 activity of the masked IL12 fusion protein is attenuated as compared to the IL12 activity of the IL12 containing polypeptide released after cleavage of the at least one protease cleavable linker.

[0294] 45. A masked IL12 fusion protein, comprising: an Fc domain comprising a first Fc polypeptide and a second Fc polypeptide; a first MM and a second MM; and an IL12 polypeptide; wherein the IL12 polypeptide comprises a p35 polypeptide and a p40 polypeptide; wherein the p35 polypeptide is fused to the first Fc polypeptide by a first linker; wherein the first MM is fused to the p35 polypeptide by a second linker; wherein the second MM is fused to the second Fc polypeptide by a third linker; and wherein the p40 polypeptide is non-covalently bound to the p35 polypeptide; and wherein at least one of the first, second or third linkers is protease cleavable; and wherein the IL12 activity of the masked IL12 fusion protein is attenuated as compared to the IL12 activity of the IL12 containing polypeptide released after cleavage of the at least one protease cleavable linker.

[0295] 46. The masked IL12 fusion protein of embodiment 43 wherein the first MM is fused to the C-terminal end of the first Fc polypeptide and wherein the second MM is fused to the C-terminal end of the second Fc polypeptide. 47. The masked IL12 fusion protein of embodiment 45 wherein the p35 polypeptide is fused to the N-terminal end of the first Fc polypeptide and wherein the second MM is fused to the N-terminal end of the second Fc polypeptide. 48. A composition comprising the masked IL12 fusion protein of any one of embodiments 1 to 47 and a pharmaceutically acceptable excipient. 49. An isolated nucleic acid encoding the masked IL12 fusion protein of any one of embodiments 1 to 47. 50. An expression vector comprising the isolated nucleic acid of embodiment 49. 51. A host cell comprising the isolated nucleic acid of embodiment 49 or the expression vector of embodiment 50. 52. A method of making a masked IL12 fusion protein comprising culturing the host cell of embodiment 51 under conditions suitable for expression of the masked IL12 fusion protein and optionally, recovering the masked IL12 fusion protein from the host cell culture medium. 53. A method of treating cancer in a subject comprising administering to the subject a therapeutically effective amount of the composition of embodiment 48.

[0296] 54. A masked interleukin 23 (IL23) fusion protein, comprising: an Fc domain comprising a first Fc polypeptide and a second Fc polypeptide; a masking moiety; a first protease cleavable linker; and an IL23 polypeptide; wherein the masking moiety is fused to the first Fc polypeptide by the first protease cleavable linker; and optionally, wherein the masking moiety further comprises a second protease cleavable linker; wherein the IL23 polypeptide is fused to the second Fc polypeptide; and wherein the IL23 activity of the masked IL23 fusion protein is attenuated as compared to the IL23 activity of the IL23 containing polypeptide released after cleavage of the protease cleavable linker. 55. The masked IL23 fusion protein of embodiment 54, wherein the IL23 is a single chain IL23 polypeptide selected from a single chain IL23 polypeptide having the orientation p19-linker-p40 or p40-linker-p19.

[0297] 56. The masked IL23 fusion protein of embodiment 54, wherein the single chain IL23 polypeptide is a p40-linker-p19 polypeptide that is fused to the second Fc polypeptide at the p40 polypeptide. 57. The masked IL23 fusion protein of embodiment 54, wherein the single chain IL23 polypeptide is a p19-linker-p40 polypeptide that is fused to the second Fc polypeptide at the p19 polypeptide. 58. The masked IL23 fusion protein of embodiment 56 or embodiment 57, wherein the single chain IL23 polypeptide is fused to the c-terminal end of the second Fc polypeptide. 59. The masked IL23 fusion protein of embodiment 56 or embodiment 57, wherein the single chain IL23 polypeptide is fused to the c-terminal end of the second Fc polypeptide and the masking moiety is fused to the c-terminal end of the first Fc polypeptide.

[0298] 60. A recombinant polypeptide comprising a protease cleavable linker (PCL) wherein the protease cleavable linker comprises the amino acid sequence MSGRSANA (SEQ ID NO:10). 61. The recombinant polypeptide of embodiment 60 comprising two heterologous polypeptides, a first polypeptide located amino (N) terminally to the PCL and a second polypeptide located carboxyl (C) terminally to the PCL. 62. The recombinant polypeptide of embodiment 61 wherein the two heterologous polypeptides are selected from a cytokine polypeptide, an antibody, an antigen-binding fragment of an antibody and an Fc domain. 63. The recombinant polypeptide of embodiment 61 wherein the recombinant polypeptide comprises a cytokine polypeptide, a MM, and an Fc domain. 64. The recombinant polypeptide of embodiment 63 wherein the MM is a single-chain Fv (scFv) antibody fragment that binds to the cytokine or a cytokine receptor polypeptide or a cytokine-binding fragment thereof. 65. The recombinant polypeptide of embodiment 61 wherein the recombinant polypeptide comprises an antibody or antigen binding fragment thereof that binds a target, and a MM that binds to the antibody or antigen binding fragment thereof and blocks binding of the antibody or antigen binding fragment thereof to the target.

[0299] 66. An isolated polypeptide comprising a PCL, wherein the PCL comprises the amino acid sequence of SEQ ID NO:10, wherein the PCL is a substrate for a protease, wherein the isolated polypeptide comprises at least one moiety (M) selected from the group consisting of a moiety that is located amino (N) terminally to the PCL (MN), a moiety that is located carboxyl (C) terminally to the PCL (MC), and combinations thereof, and wherein the MN or MC is selected from the group consisting of an antibody or antigen binding fragment thereof; a cytokine or a functional fragment thereof; a MM; a cytokine receptor or a functional fragment thereof; an immunomodulatory receptor, or functional fragment thereof; an immune checkpoint protein or a functional fragment thereof; a tumor associated antigen; a targeting domain; a therapeutic agent; an antineoplastic agent; a toxic agent; a drug; and a detectable label.

[0300] Unless defined otherwise, all technical and scientific terms used herein have the same meaning as is commonly understood by one of skill in the art to which the claimed subject matter belongs. In the event that there are a plurality of definitions for terms herein, those in this section prevail. Where reference is made to a URL or other such identifier or address, it is understood that such identifiers can change and particular information on the internet can come and go, but equivalent information can be found by searching the internet. Reference thereto evidences the availability and public dissemination of such information. Terms understood by those in the art of antibody technology are each given the meaning acquired in the art, unless expressly defined differently herein.

[0301] It is to be understood that the general description and following detailed description are exemplary and explanatory only and are not restrictive of any subject matter claimed.

[0302] In this application, the use of the singular includes the plural unless specifically stated otherwise.

[0303] In the present description, any concentration range, percentage range, ratio range, or integer range is to be understood to include the value of any integer within the recited range and, when appropriate, fractions thereof (such as one tenth and one hundredth of an integer), unless otherwise indicated. As used herein, “about” means±10% of the indicated range, value, sequence, or structure, unless otherwise indicated. It should be understood that the terms “a” and “an” as used herein refer to “one or more” of the enumerated components unless otherwise indicated or dictated by its context. The use of the alternative (e.g., “or”) should be understood to mean either one, both, or any combination thereof of the alternatives. As used herein, the terms “include” and “comprise” are used synonymously. In addition, it should be understood that the individual single chain polypeptides or immunoglobulin constructs derived from various combinations of the structures and substituents described herein are disclosed by the present application to the same extent as if each single chain polypeptide or heterodimer were set forth individually. Thus, selection of particular components to form individual single chain polypeptides or heterodimers is within the scope of the present disclosure.

[0304] The section headings used herein are for organizational purposes only and are not to be construed as limiting the subject matter described.

[0305] It is to be understood that the methods and compositions described herein are not limited to the particular methodology, protocols, cell lines, constructs, and reagents described herein and as such may vary. It is also to be understood that the terminology used herein is for the purpose of describing particular embodiments only and is not intended to limit the scope of the methods and compositions described herein, which will be limited only by the appended claims.

### EXAMPLES

### Experimental Protocols

### Cloning

### Protocol 1: Cloning

[0306] The polypeptide sequences of clones presented in the following examples were reverse translated to DNA, codon optimized for mammalian cell expression, and gene synthesized. All sequences were preceded by an artificially designed signal peptide of sequence MRPTWAWWLFLVLLLALWAPARG (SEQ ID NO: 1) (Barash S et al., Biochem and Biophys Res. Comm. 2002; 294, 835-842). For all sequences, vector inserts consisting of a 5′-EcoR1 restriction site, the signal peptide described above, the codon-optimized DNA sequence corresponding to clones presented in the following examples, a TGA or TAA stop codon, and a BamH1 restriction site-3′, were ligated into pTT5 vectors to produce expression vectors (Durocher Y et al., Nucl. Acids Res. 2002; 30, No. 2 e9). The resulting expression vectors were sequenced to confirm correct reading frame and sequence of the coding DNA.

### Mammalian Cell Transient Transfection and Protein Expression

### Protocol 2: Expi293™ Expression

[0307] Expi293™ cells were cultured at 37° C. in Expi293™ expression medium (Thermo Fisher, Waltham, Mass.) on an orbital shaker rotating at 125 rpm in a humidified atmosphere of 8% CO2. Each 1 mL of cells at a density of 3×10⁶ cells/mL was transfected with a total of 1 μg DNA. Prior to transfection the DNA was diluted in 60 μL Opti-MEM™ I Reduced Serum Medium (Thermo Fisher, Waltham, Mass.). In a volume of 56.8 μL Opti-MEM™ I Reduced Serum Medium, 3.2 μL of ExpiFectamine™ 293 Reagent (Thermo Fisher, Waltham, Mass.) was diluted and, after incubation for five minutes, combined with the DNA transfection mix to a total volume of 120 μL. After 20 minutes the DNA-ExpiFectamine™ 293 Reagent mixture was added to the cell culture. After incubation at 37° C. for 16-18 hours, 6 μL of ExpiFectamine 293 Transfection Enhancer 1 (Thermo Fisher, Waltham, Mass.) and 60 μL of ExpiFectamine 293 Transfection Enhancer 2 (Thermo Fisher, Waltham, Mass.) was added to the culture. Cells were incubated for five to seven days and supernatants were analyzed by non-reducing SDS-PAGE.

### Protocol 3: ExpiCHO™ Expression

[0308] ExpiCHO™ cells were cultured at 37° C. in ExpiCHO™ expression medium (Thermo Fisher, Waltham, Mass.) on an orbital shaker rotating at 125 rpm in a humidified atmosphere of 8% CO2. Each 1 ml of cells at a density of ˜6×10⁶ cells/ml was transfected with a total of 0.8 μg DNA. Prior to transfection the DNA was diluted in 40 μL OptiPRO™ SFM (Thermo Fisher, Waltham, Mass.). In a volume of 36.8 μL OptiPRO™ SFM, 3.2 μL of ExpiFectamine™ CHO reagent (Thermo Fisher, Waltham, Mass.) was diluted and, after incubation for one to five minutes, combined with the DNA transfection mix to a total volume of 80 μL. After one to five minutes the DNA-ExpiFectamine™ CHO Reagent mixture was added to the cell culture. After incubation at 37° C. for 18-22 hours, 6 μL of ExpiCHO™ Enhancer and 240 μL of ExpiCHO™ Feed (Thermo Fisher, Waltham, Mass.) were added to each culture. Cells were incubated for seven days and supernatants were harvested for protein purification.

### Protocol 4: CHO-3E7 Expression

[0309] CHO-3E7 cells at a density of 1.7-2×10⁶ cells/ml were cultured at 37° C. in FreeStyle™ F17 medium (Thermo Fisher, Watham, Mass.) supplemented with 4 mM glutamine (GE Life Sciences, Marlborough, Mass.) and 0.1% Pluronic F-68 (Gibco, Life Technologies). Cells were transfected with 1 μg DNA per 1 mL of cells (DNA comprised of Variant expression vector DNA mixtures and GFP/AKT/stuffer DNA in a 1:1 w/w ratio) using PEI-max (Polyscience, Philadelphia, Pa.) at a DNA:PEI ratio of 1:4 (w/w). Twenty-four hours after the addition of the DNA-PEI mixture, 0.5 mM valproic acid (final concentration), 1% w/v Tryptone (final concentration), and 1×antibiotic/antimycotics (GE Life Sciences, Marlborough, Mass.) were added to the cells, which were then transferred to 32° C. and incubated for 7 days prior to harvesting.

### Protocol 5: HEK293-6E Expression

[0310] HEK293-6E cells at a density of 1.5-2.2×10⁶ cells/ml were cultured at 37° C. in FreeStyle™ F17 medium (GIBCO Cat #A13835-01) supplemented with G418 (Wisent bioproducts cat #400-130-IG), 4 mM glutamine, and 0.1% Pluronic F-68 (Gibco Cat #24040-032). Cells were transfected with 1 μg DNA per 1 mL of cells (DNA comprised of Variant expression vector DNA mixtures and GFP/AKT/stuffer DNA in a 1:1 w/w ratio) using PEI-max (Polyscience, Philadelphia, Pa.) at a DNA:PEI ratio of 1:2.5 (w/w). Twenty-four hours after the addition of the DNA-PEI mixture, 0.5 mM Valproic acid (final concentration) and 0.5% w/v Tryptone N1 (final concentration) were added to the cells, which were then transferred to 37° C. and incubated for 7 days prior to harvesting.

### Protein Purification

### Protocol 6: Protein-A Affinity Purification 1

[0311] Supernatants from transient transfections were applied to slurries containing 50% mAb Select SuRe™ resin (GE Healthcare, Chicago, Ill.) and incubated overnight at 2-8° C. on an orbital shaker at 150 rpm. The slurries were transferred into chromatography columns and flow-throughs were collected. The resins were then washed with 5 Bed Volumes (BV) of resin Equilibration buffer (PBS). To elute the targeted proteins, 5.5 BV of acidic Elution Buffer (100 mM sodium citrate buffer pH 3.5) was added to the columns and collected in fractions. Elution fractions were then neutralized by adding 10% (v/v) 1 M Tris pH 9 to reach a final pH of 6-7. The protein content of each elution fraction was determined by 280 nm absorbance measurement using a Nanodrop™ or with a relative colorimetric protein assay. The most concentrated fractions were pooled, which correspond to at least 80% of the total eluted protein.

### Protocol 7: Protein-A Affinity Purification 2

[0312] Purification of antibodies from clarified supernatants was performed using batch binding followed by the Amicon® Pro Purification System (Millipore-Sigma, cat #AC S503012). A 10 kDa MW membrane cutoff was used in the ultrafiltration portion of the device. A quantity of 200 μl of 50% (v/v) slurry of mAb Select SuRe Resin™ (GE Healthcare, cat #17543802) was added to clarified supernatant samples and the samples incubated in an orbital shaker overnight. The next day, the samples were centrifuged and most of the spent supernatant manually removed from each tube. The mAb Select SuRe™ resin was re-suspended in the remaining liquid and added to the Amicon® Pro Purification device. The Amicon Pro purification device was then centrifuged to remove remaining spent culture supernatant. Each sample was then washed with 1.5 mL (15 bed volumes of dPBS (HyClone —Ca, —Mg [GE Healthcare, cat #SH30028.02]) and the wash collected by centrifugation. 0.5 mL (5 bed volumes) of elution buffer (100 mM sodium citrate pH 3) was added to the Amicon® Pro Purification device and the unit centrifuged. The eluted proteins were collected and the pH adjusted by adding 10% (v/v) of 1 M HEPES base. Protein concentration was determined using absorbance at 280 nm with a Nanodrop 2000™ instrument (Thermo-Fisher Scientific, cat #ND-2000). Purified antibodies were sterile-filtered (0.2 μm) and stored at 2-8° C. in polypropylene tubes.

### Protocol 8: Size-Exclusion Chromatography (SEC) Purification

[0313] Samples were loaded onto a Superdex 200 Increase 10/300 column (#28-9909-44, GE Healthcare Life Sciences, Marlborough, Mass.) on an Akta pure 25 chromatography system (GE Healthcare Life Sciences, Marlborough, Mass.) in PBS with a flow rate of 0.8 mL/min. Fractions of eluted protein were collected based on A280 nm and their purity were analyzed by non-reducing CE-SDS with LabChip™ GXII Touch (Perkin Elmer, Waltham, Mass.). Protein containing fractions of high purity were pooled and protein in final pools was quantitated based on A280 nm (Nanodrop™) post SEC.

### Protein Analytics

### Protocol 9: Capillary Electrophoresis (CE) Using LabChip™

[0314] Following protein-A affinity purification, purity of samples was assessed by non-reducing and reducing LabChip™ CE-SDS. LabChip™ GXII Touch (Perkin Elmer, Waltham, Mass.) analysis was carried out according to Protein Express Assay User Guide (PerkinElmer, Waltham, Mass.), with the following modifications. Samples at a concentration range of 5-2000 ng/μ1 were added to separate wells in 96 well plates (#MSP9631, BioRad, Hercules, Calif.) along with 7 μl of HT Protein Express Sample Buffer (#CLS920003, Perkin Elmer) and denatured at 90° C. for 5 mins. The LabChip™ instrument was operated using the LabChip™ HT Protein Express Chip (Perkin Elmer #760528) with HT Protein Express 200 assay setting.

### Protocol 10: UPLC-SEC

[0315] The masked and unmasked cytokine fusion protein variants were assessed by UPLC-SEC to determine their percentage of high molecular weight species. UPLC-SEC was performed using a Waters Acquity BEH200 SEC column (2.5 mL, 4.6×150 mm, stainless steel, 1.7 μm particles) (Waters LTD, Mississauga, ON) set to 30° C. and mounted on an Agilent Technologies 1260 infinity II system with a PDA detector. Run times consisted of 7 min and a total volume per injection of 2.8 mL with a running buffer of either 150 mM Sodium Phosphate pH 6.95, DPBS+0.02% Tween 20, or 200 mM KPO4, 200 mM KCl, pH7, at 0.4 mL/min. Elution was monitored by UV absorbance in the range 210-500 nm, and chromatograms were extracted at 280 nm. Peak integration was performed using OpenLAB™ CDS ChemStation™ software.

### Protocol 11: Differential Scanning Calorimetry (DSC)

[0316] The thermal stability and Tm of variants was assessed by DSC. 950 μL of purified samples at concentrations between 0.24 and 1.9 mg/mL in PBS were used for DSC analysis with a Nano DSC (TA instruments, New Castle, Del.). At the start of each run, buffer blank injections were performed to stabilize the baseline. Each sample was scanned from 25 to 95° C. at a 60° C./hr rate, with 60 psi nitrogen pressure. The resulting thermograms were referenced and analyzed using NanoAnalyze software to determine melting temperature (Tm) as an indicator of thermal stability.

### Protein Binding Experiments

### Protocol 12: IL12 Binding Determination by Surface Plasmon Resonance (SPR)

[0317] Fusion protein variants were tested for their binding to recombinant IL12 and affinities (KD) were determined by Surface Plasmon Resonance (SPR). Experiments were carried out on a Biacore™ T200 instrument (GE LifeSciences) at 25° C. in PBS pH 7.4+0.05% (v/v) Tween 20 (PBS-T) running buffer. Variants were captured onto the anti-human Fc-specific polyclonal antibody surface, followed by the injection of five concentrations of recombinant IL12. The anti-human Fc surface was prepared on a CMS Series S sensor chip (GE LifeSciences) by standard amine coupling as described by the manufacturer (GE LifeSciences). Briefly, immediately after EDC/NHS activation, a 25 μg/mL solution of anti-human IgG Fc (Jackson Immuno Research) in 10 mM NaOAc, pH 4.5, was injected at a flow rate of 5 μL/min for 360 seconds. The remaining active groups were quenched by a 420 s injection of 1 M ethanolamine hydrochloride-NaOH pH 8.5 at 10 μL/min. Next, variants for analysis were indirectly captured onto the anti-Fc surface by injecting 5 μg/mL solutions at a flow rate of 10 μL/min for 30s. Using multi-cycle kinetics, five concentrations of a two-fold dilution series of recombinant IL12 (Peprotech) starting at 2.5 nM with a blank buffer control were sequentially injected at 50 μL/min for 180 s with a 1800 s dissociation phase, resulting in a set of sensorgrams with a buffer blank reference. The same sample titration was also performed on a reference cell with anti-human Fc immobilized and no variants captured. The anti-human Fc surfaces were regenerated to prepare for the next injection cycle by one pulse of 10 mM glycine/HCl, pH 1.5, for 60 s at 30 μL/min. Double-referenced sensorgrams were analyzed using Biacore™ T200 Evaluation Software v3.0 and fit to the 1:1 Langmuir binding model.

### Mass Spectrometry

### Protocol 13: LTQ-Orbitrap Intact Mass Spectrometry

[0318] LC/MS was performed on fusion protein variants having protease cleavable linkers to identify the locations of cleavage and apparent abundance of cleaved species. Samples were treated with 20 mM DTT at 56° C. for 30 minutes and then deglycosylated overnight at 37° C. with a mixture of PNGaseF, neuraminidase, β-galactosidase and N-acetylglucosaminidase, and subjected to intact mass LCMS analysis using an Agilent E1P1100 Capillary LC (Binary Pump, Autosampler) coupled to an LTQ-Orbitrap-XL mass spectrometer via an Ion-Max electrospray source. A 2.1×30 mm POROS R2 column was used to desalt and separate the proteins. The HPLC column was housed in a Sidewinder LC column heater and the mobile phase was heated pre-column in an Isotemp Oven. The oven and the column heater were both set to 82.5-90° C. The LC mobile phases were 0.1% formic acid (solvent A) and acetonitrile (solvent B). The mass spectrometer was tuned for high mass analysis with the HCD collision gas set to “off”, “detection delay” set to “low”, and the FTMS detector resolution set at “7500”. The “spray voltage” was set to 3.8 kV, the “sheath gas” flowrate and the “auxiliary gas” flowrate were set at 40 and 20, respectively. The liquid chromatograph was set at a flow rate of 3 mL/min. A post-column splitter directed 100 μL/min of flow to the MS electrospray. The flow was diverted from the electrospray source for the first 1.5 minutes of the LC run to avoid contaminating the electrospray source. After 3 minutes, the gradient ramped from 20% to 90% solvent B in 3 minutes (linear gradient). After the linear gradient, the system re-equilibrated at 20% solvent B for 3 minutes. The raw protein mass spectra were transformed into a MassLynx-compatible file format using Databridge then deconvoluted to a molecular weight profile using MaxEnt.

### Protocol 14: Synapt Q-TOF Intact Mass Spectrometry

[0319] LC/MS was performed on fusion protein variants having protease cleavable linkers to identify the locations of cleavage. Samples were deglycosylated overnight at 37° C. with PNGaseF, neuraminidase, β-galactosidase and N-acetylglucosaminidase, and subjected to intact mass LCMS analysis using an Agilent HP1100 Capillary LC (Binary Pump, Autosampler) coupled to a Synapt G2-Si quadrupole time-of-flight mass spectrometer via a high flow electrospray ion source. A 2.1×30 mm POROS R2 column was used to desalt and separate the proteins. The HPLC column was housed in a Sidewinder LC column heater and the mobile phase was heated pre-column in an Isotemp Oven. The oven and the column heater were both set to 82.5-90° C. The LC mobile phases were 0.1% formic acid (solvent A) and acetonitrile (solvent B). The mass spectrometer was tuned using Glul-fibrinopeptide b to ensure optimal sensitivity and resolution: a 500 fmol/μL solution flowing at 1 μl/min should yield a minimum signal of 1e6 for the doubly protonated molecular ion at a resolution of 20,000. The electrospray and cone voltages were set to 3 kV and 150 V, respectively. The trap collision energy and the transfer collision energy were both set at 4V. The desolvation gas flow was 600 L/min. The LockSpray option was turned off as this interfered with acquisition of the protein mass spectra. However, mass accuracy of the protein multiply charged ions did not deteriorate as a result. The liquid chromatograph was set at a flow rate of 3 mL/min. A post-column splitter directed 100 μL/min of flow to the MS electrospray. The flow was diverted from the electrospray source for the first 1.5 minutes of the LC run to avoid contaminating the electrospray source. After 3 minutes, the gradient ramped from 20% to 90% solvent B in 3 minutes (linear gradient). After the linear gradient, the system re-equilibrated at 20% solvent B for 3 minutes. The raw protein mass spectra were deconvoluted to generate molecular weight profiles using MaxEnt.

### Example 1: Design of Parental Non-Masked IL12 and IL23 HetFc Fusion Proteins

[0320] Non-masked parental IL12 fusion proteins to the Heterodimeric Fc (HetFc′) were designed using three different approaches:
[0321] A) The p40 subunit fused N- or C-terminally to one of the HetFc chains with a peptide linker, and the p35 subunit co-expressed
[0322] B) The p35 subunit fused N- or C-terminally to one of the HetFc chains with a peptide linker, and the p40 subunit co-expressed
[0323] C) The p35 subunit fused C-terminally to the p40 subunit by a peptide linker to create single-chain IL12 (′ scIL12′), and scIL12 fused C-terminally to one of the HetFc chains using a peptide linker

[0324] Specific non-masked parental IL12 HetFc fusion constructs are summarized in Table 1 and diagrammed in FIG. 1.

TABLE 1
Non-masked parental IL12 HetFc fusion protein variants

| Variant ID | HetFc 1 clone ID | HetFc 2 clone ID | Other clone ID |
|---|---|---|---|
| v22945 | CL_#17875^{a} | CL_#12153 | CL_#17871 |
| v22946 | CL_#17877 | CL_#12153 | CL_#17871 |
| v22948 | CL_#17879 | CL_#12153 | CL_#17872 |
| v22949 | CL_#17875 | CL_#17881 | CL_#17871 |
| v22951 | CL_#17876 | CL_#12153 | NA |
| v23086 | CL_#17942 | CL_#12153 | CL_#17872 |
| v23087 | CL_#17942 | CL_#17880 | CL_#17872 |

^{a}Structural summaries and SEQ IDs for all clones are given in Table 23

[0325] Non-masked parental IL23 fusion proteins to the HetFc were designed as described above for IL12 but with the p19 subunit used instead of the p35 subunit. Specific constructs are summarized in Table 2.

TABLE 2
Non-masked parental IL23 HetFc fusion protein variants

| Variant ID | HetFc 1 clone ID | HetFc 2 clone ID | Other clone ID |
|---|---|---|---|
| v23046 | CL_#17906 | CL_#12153 | CL_#17871 |
| v23048 | CL_#17907 | CL_#12153 | CL_#17871 |
| v23051 | CL_#17879 | CL_#12153 | CL_#17908 |
| v23088 | CL_#17942 | CL_#12153 | CL_#17908 |
| v23091 | CL_#17945 | CL_#12153 | NA |

### Example 2: Design, Selection and Characterization of Protease Cleavage Sites

[0326] The following example describes the design, identification and characterization of cleavage site(s) that are specifically cleaved by serine proteases or other tumour microenvironment specific proteases, such as urokinase plasminogen activator (uPA) and matriptase.

[0327] UPA and matriptase were identified as TME-specific proteases through literature and genome-wide mRNA analysis between healthy individuals and patients with various primary tumour or metastasis (Hoadley et al, Cell, 2018; GTEX Consortium, Nature, 2017; Robinson et al, Nature, 2017).

[0328] A library of cleavage sites that is specifically cleaved by TME-specific proteases was designed to release one or multiple cleavable moieties from a fusion protein (e.g., from a masked cytokine or antibody). Such masked molecules may include antibodies, antibody drug conjugates, antibody fusion protein, or other related molecules known in the art and described herein. The selection of an 8 amino acid residue long cleavage site (P4-P4′) is based on previous publications and structural observations indicating that residues within this range influence the specificity and catalytic activity of uPA and matriptase (FIGS. 2A and 2B).

[0329] TSGRSANP (SEQ ID NO: 2) and LSGRSDNH (SEQ ID NO: 3) have been identified as uPA and matriptase specific sequences, respectively, and are used as benchmarks for all activity assays. SGR(S>R,K,A,)X, where X represents a variety of amino acid residues, but was most often alanine, glycine, serine, valine, or arginine, has been identified as a consensus sequence for uPA (Ke et al., JBC, 1997, 272(33), 20456) and is used as a comparator.

[0330] The library was designed and tested in a one-armed antibody format, where a cleavable moiety composed of a mesothelin (uniprot entry Q13421) fragment is linked by a flexible cleavable linker to the N-terminus of an anti-mesothelin Fab-Fc through the heavy chain (FIGS. 3A and 3B).

Design of uPa/Matriptase Cleavage Sites

[0331] Previous publications and art on peptide sequences that are cleaved by uPA were used to identify positions that can impact cleavage activity. However, cleavage in the context of a peptide or a protein will be significantly different in terms of kinetics (K_{cat}, Kₘ and Vₘₐₓ). Exposure of the site and flexibility/rigidity of the environment in a protein setting impacts the rate at which the site is cleaved because adopting the conformation required for the active conformation is likely less energetically favorable. Thus, transferability of a peptide with high specific activity to a larger therapeutic molecule cannot be easily predicted.

[0332] As a starting point, sequences known to be cleaved by uPA were selected from the literature (Ke et al., JBC, 1997, 272(33), 20456; Coomb et al, JBC, 1998, 273(8), 4323; Bergstrom et al, Biochemistry, 2003, 43, 5395). We then explored multiple amino acid substitutions at all positions from P4-P4′ through different strategies:

[0333] Strategy #1:
[0334] Alternate sequences from SGR consensus, that were known to be cleaved by uPA in peptide phage display libraries and met the following criteria:
[0335] no large hydrophobic residues such as Y, F, W or H at P4,
[0336] no Y, F or R residues at P3,
[0337] no cysteine in the sequence
[0338] and no R at P1′.
[0339] In instances where the cleavage site did not span the 8 residues, additional residues were added at the N-terminus and C-terminus to complete the motif.

[0340] Strategy #2:
[0341] Consensus sequence for uPA (SGRS) were combined with amino acids at positions P2′-P4′ that were known to induce uPA specificity (Ke et al., JBC, 1997, 272(33), 20456.). Based on crystal structures (FIGS. 2A and 2B) P3 and P4 are important for uPA and matriptase specificity, and thus P3 and P4 were individually modified for residues T, I, G, H, K, V and K, S, T, A, R, M, respectively.

[0342] Strategy #3:
[0343] Fragments of sequences that showed either high specificity or activity for uPA, in the literature and in our experimental data generated above were combined to generate sequences with improved properties. Properties evaluated include high specificity and activity for selected serine proteases such as uPA and matriptase.

[0344] The cleavage activity by uPA, matriptase and plasmin of 35 sequences, generated as discussed above, was evaluated in the context of a fusion protein in vitro under physiologically relevant conditions as described below. Some cleavage sequences performed comparably to the benchmark cleavage sequences for uPA, matriptase and plasmin cleavage. Some sequences showed no specific uPA cleavage and comparable or higher cleavage by matriptase and/or plasmin as compared to the benchmark. Other sequences showed no specific uPA cleavage and lower cleavage by matriptase and/or plasmin as compared to the benchmark. Representative results are reported in Table 3 (SEQ ID NOs: 2-10). A plasmin cleavage assay was used as a proxy for general serine protease resistance. Sample production is described in General Methods as Protocol 4 and Protocol 7.

### Enzymatic Digestions

[0345] For initial protease digestion screening, aliquots of purified antibodies were buffer exchanged into DPBS+0.01% [v/v] PS-20 using a PD MultiTrap G-25 desalting plate (GE

[0346] Healthcare cat #28-9180-06). All variants were digested with human uPA (Cedarlane cat #1310-SE-010), plasmin (Cedarlane cat #MD-14-0070P) or matriptase (Cedarlane cat #3946-SE-010) at a ratio of 1:50 (w/w). Digestion samples in a 96-well microtiter plates (BioRad Laboratories, cat #HSP9601) were incubated at room temperature (22° C.) for 48 h. Uncleaved variant controls incubated in parallel were included for each digestion experiment performed. Each digest or control sample was analyzed by non-reducing SDS-PAGE.

### Non-Reducing SDS-PAGE

[0347] Protein digests were analyzed by non-reducing SDS-PAGE using the NuPAGE XCell MiniCell (cat #EI001) or Midi Cell (cat #WR0100) with NuPAGE Bis-Tris gels (Life Technologies, Thermo-Fisher Scientific). Samples were prepared in LDS sample buffer (Life Technologies, Thermo-Fisher Scientific, cat #NP007) and heated at 70° C. for 10 min. Gels were stained using SYPRO Ruby protein gel stain (Life Technologies, Thermo Fisher Scientific, cat #S-12000).

TABLE 3
Cleavage of selected representative
sequences by specific and non-
specific serine proteases

| | | | Uroki- | | |
|---|---|---|---|---|---|
| | | | nase | | |
| | | | plas- | | |
| | Cleavage | | min- | | |
| | site | SEQ | ogen | | |
| | se- | ID | acti- | | Plas- |
| Variant* | quences | NO** | vator | Matriptase | min |
| 22775- | LSGRSDNH | 3 | +++ | ++++ | +++ |
| Benchmark | | | | | |
| (was CV1) | | | | | |
| 22776- | TSGRSANP | 2 | ++++ | ++++ | +++ |
| Benchmark | | | | | |
| (was CV2) | | | | | |
| 22780- | GSGRSAQV | 4 | ++ | ++ | ++++ |
| uPA | | | | | |
| consensus | | | | | |
| (was CV3) | | | | | |
| 22781 | GSSRNADV | 5 | − | ++ | ++++ |
| (was CV4) | | | | | |
| 22783 | GTARSDNV | 6 | − | +++ | ++++ |
| (was CV5) | | | | | |
| 22787 | GGGRVNNV | 7 | − | ++ | + |
| (was CV6) | | | | | |
| 22789 | MSARILQV | 8 | − | ++++ | ++++ |
| (was CV7 | | | | | |
| CV8 | GKGRSANA | 9 | − | ++ | ++++ |
| 22804 | MSGRSANA | 10 | ++++ | ++++ | ++ |
| (was CV9) | | | | | |
| 22793 | GTGRSANA | 346 | ++++ | ++++ | +++ |
| 22802 | ASGRSANA | 347 | +++ | ++ | +++ |
| 22777 | GSGKSANA | 348 | ++ | ++++ | ++++ |
| 22778 | GSGRNAQV | 349 | ++ | ++++ | ++++ |
| 22779 | GSGKNAQV | 350 | ++ | +++ | ++++ |
| 22782 | GTARLRGV | 351 | + | ++++ | ++++ |
| 22784 | GTSRMGTV | 352 | + | ++++ | ++++ |
| 22785 | GTSRQAQV | 353 | ++ | ++++ | ++++ |
| 22786 | AIKRSAQV | 354 | ++ | ++++ | ++++ |
| 22788 | STARMLQV | 355 | + | ++++ | ++++ |
| 22790 | GTQRSTGV | 356 | +++ | +++ | ++++ |
| 22791 | GTRRDRIV | 357 | ++ | ++++ | ++++ |
| 22792 | GVARNYKV | 358 | − | ++++ | +++ |
| 22794 | GGGRSANA | 359 | ++ | ++++ | +++ |
| 22795 | GVGRSANA | 360 | +++ | +++ | ++++ |
| 22796 | GIGRSANA | 361 | ++ | ++++ | +++ |
| 22797 | GHGRSANA | 452 | ++ | ++++ | +++ |
| CV27 | KSGRSANA | 453 | − | ++++ | +++ |
| CV28 | TSGRSANA | | +++ | +++ | ++++ |
| 22801 | SSGRSANA | 365 | +++ | +++ | +++ |
| 22803 | RSGRSANA | 366 | +++ | +++ | ++ |

Each variant contains an antigen ECD fragment fused through a linker containing the indicated cleavable sequence to an anti-domain antibody heavy chain containing HetFc1 mutations, with a domain structure of: antigen ECD fragment-PQGQGGGGSGGGGNSP-Cleavable Sequence-QGQSGQGG-Anti-domainvH-CH1-HetFc. Each variant also includes the Clone_#12155 HetFc2 and anti-domain antibody light chain.
**Cleavage sequence SEQ ID NO. For Clone domain structure see Table 23.
++++: >90% cleavage observed; +++: 75% cleavage observed; ++: 50% cleavage observed;
+: <25% cleavage observed;
−: no specific cleavage observed
The consensus cleavage site of uPa is highlighted in bold.

[0348] Cleavage sites in variants v22781, v22783 and v22789, which were shown to be cleaved by uPA in a peptide phage display library, were not transferable to an antibody fusion protein. These results highlight the impact of the surrounding environment, in terms of flexibility, site accessibility and local structure, on the cleavage site's activity.

[0349] The cleavability of the designed cleavage sequences by matriptase and plasmin has not been reported previously and spans a range of cleavability based on the different sequences.

[0350] Suitable cleavage sequences were selected based on positive and negative selection of the sites with different proteases. All sequences were clustered in the following categories, where cleavage by plasmin was used as a proxy for protease resistance:

[0351] 1) elevated protease resistance (<25% cleaved by plasmin)

[0352] 2) efficient matriptase cleavage activity only (>90% cleaved by matriptase)

[0353] 3) efficient uPA and matriptase activity with high protease resistance (>90% cleaved by matriptase, <50% cleaved by plasmin)

[0354] 4) efficient uPA and matriptase activity with moderate protease resistance (>90% cleaved by matriptase and uPa, <75% cleaved by plasmin)

[0355] 5) intermediate activity for uPA and matriptase with moderate protease resistance (>50% cleaved by matriptase, <75% cleaved by plasmin)

[0356] 6) intermediate activity for uPA and matriptase with low protease resistance (>50% cleaved by matriptase and uPa, ˜90% cleaved by plasmin)

[0357] Representative sequences with diverse properties were further characterized through enzymatic assays with uPA and matriptase under different conditions to mimic possible tumour microenvironment conditions. As the tumour microenvironment is often subjected to hypoxia as well as various resistance mechanisms that promote tumour growth and induce a lower local pH (Tannock and Rotin, 1989, Cancer Research, 49, 4373), representative sequences were assessed for their cleavage activity at different pH conditions ranging from pH 6.0 to 7.4.

[0358] The cleavage activity by uPA and matriptase of 7 representative sequences with diverse properties, as discussed above, was evaluated in the context of a fusion protein at pH 6.0 and 7.4. Some cleavage sequences were identified that performed comparably to the benchmark for uPA and matriptase at both pH. Some sequences showed comparable specific matriptase cleavage and higher cleavage by uPA as compared to the benchmark. Other sequences showed no specific uPA cleavage and lower or comparable cleavage by matriptase at both pH as compared to the benchmark. Representative results are reported in Table 4.

### Enzymatic Digestions

[0359] Samples were incubated at either pH 6 (buffer exchanged in DPBS+0.01% [v/v] PS-20 pH adjusted with HCl using Zebaspin 754, desalting columns (Thermo-Fisher Scientific, cat #89877)) or pH 7.4 (DPBS+0.01% [v/v] PS-20) in digests containing either matriptase (Cedarlane, cat #3946-SE-010) or uPa (Cedarlane, cat #1310-SE-010) at a ratio of 1:50 (w/w) in capped vials with inserts to minimize sample evaporation (Chromatographic Specialties Inc., cat #CQ2026). Samples were incubated at 37° C. for 48h. Control samples containing variant and buffer without enzyme were incubated in parallel for 48 h. All samples were analyzed by non-reducing SDS-PAGE as described above.

TABLE 4
Cleavage level of representative sequences by uPA and matriptase
at pH ranges representative of the tumour environment

| | uPa | uPa | Matriptase | Matriptase |
|---|---|---|---|---|
| | Cleavage | Cleavage | Cleavage | Cleavage |
| Variant | pH 6.0 | pH 7.4 | pH 6.0 | pH 7.4 |
| v22776 - | ++ | ++++ | ++++ | ++++ |
| Benchmark | | | | |
| v22780 - | ++ | ++++ | ++++ | ++++ |
| uPa Consensus | | | | |
| v22787 | − | − | + | ++ |
| v22789 | − | − | +++ | ++++ |
| v22793 | ++++ | ++++ | ++++ | ++++ |
| v22802 | ++ | ++++ | ++++ | ++++ |
| v22804 | ++ | ++++ | ++++ | ++++ |

++++: >90% cleavage observed;
+++: 75% cleavage observed;
++: 50% cleavage observed;
+: <25% cleavage observed;
−: no specific cleavage observed.

[0360] The sequences tested have different pH dependence for uPA and matriptase. All sequences had reduced uPA activity at low pH, but v22804 retained similar activity levels to the benchmark. Matriptase cleavage was also reduced at lower pHs for most variants. V22804 performed equally to the benchmark and consensus sequences in this assay as the samples were readily cleaved within 48h.

[0361] The cleavage activity by uPA and matriptase of 7 sequences identified above was further characterized in the context of a fusion protein in vitro under physiologically relevant conditions. We identified cleavage sequences that performed comparably or better than the benchmark cleavage sequences for uPA and matriptase cleavage. Other sequences showed no specific uPA cleavage and lower cleavage by matriptase as compared to the benchmark. Representative results are reported in FIGS. 4A and 4B.

### Kinetic Studies

[0362] For kinetic cleavage studies of selected antibodies, samples were buffer exchanged into DPBS+0.01% [v/v] PS-20 using 0.5 mL Zebaspin desalting columns (Thermofisher Cat #89882). Digests using either human matriptase (Cedarlane, cat #3946-SE-010) or uPA (Cedarlane, cat #1310-SE-010), with either enzyme at a ratio of 1:50 (w/w). Digestion reactions were setup in capped vials with inserts to minimize sample evaporation (Chromatographic Specialties Inc., cat #CQ2026) and incubated at 37° C. for 1 h, 2h, 4h, 6h, 24 h, 48h or 5 days. Antibody samples incubated under the same conditions without added enzyme served as controls. Samples for controls without enzyme and digests including enzyme for each time point were analyzed by non-reducing SDS-PAGE as described above.

[0363] The cleavage site within v22804 (MSGRSANA; SEQ ID NO:10) was identified as a suitable lead cleavage sequence that has high specific cleavage activity for uPA and matriptase, while being resistant to other serine protease such as plasmin. Variant v22804 showed high specific cleavage activity by uPA and matriptase and has comparable or improved properties compared to the consensus and benchmark sequences (Table 3, Table 4 and FIGS. 4A-4B).

### Example 3: Preparation of Anti-IL12/23 ScFv Masks

[0364] This example describes the re-formatting of anti-IL12/23 antibodies into single-chain variable fragment(s), scFv(s), to be used as masking moieties when fused to IL12/23 HetFc fusion proteins.

[0365] To create masked IL12 HetFc fusion proteins where the activity of IL12 is reduced compared to the parental non-masked IL12 HetFc fusion proteins described in Example 1, a polypeptide domain with affinity for IL12 that reduces IL12 binding to either or both of its receptors can be attached to the parental IL12 HetFc fusion proteins through protease-cleavable linkers. The polypeptide can be an antibody, specifically a Fab or scFv with affinity for IL12. Existing binders for IL12 are for example the antibodies Briakinumab and Ustekinumab.

[0366] Fusing an scFv mask instead of a Fab mask to parental IL12 HetFc fusion proteins may be superior because shorter linker lengths could be applied and the light chain would not need to be co-expressed. In addition, an scFv mask fusion would be compatible with the addition of Fab targeting arms to the masked IL12 HetFc, whereas a Fab mask would require that additional engineering be employed to prevent incorrect pairing between the heavy and light chains of the masking and targeting Fabs.

[0367] ScFv constructs of Briakinumab (Table 5) were created in two different orientations, with either the VH fused to the N-terminus of the VL by a (G4S)3 linker, or the VL fused to the N-terminus of the VH by a (G4S)3 linker. ScFv-HetFc fusions were then designed by fusing either scFv to the N- or C-terminus of one of the two HetFc heavy chains. A control Fab-HetFc fusion was constructed by fusing the Briakinumab VH-CH1 domains to one of the two HetFc chains and co-expressing the light chain VL-CL. Specific constructs are summarized in Table 6. To compare if the Briakinumab scFvs maintained affinity for IL12 compared to the Briakinumab Fab, scFv-HetFc and Fab-HetFc proteins were produced and tested for binding to recombinant IL12 by SPR.

TABLE 5
Briakinumab variable domain sequences

| | | SEQ |
|---|---|---|
| | | ID |
| Name | Sequence | NO: |
| VH | QVQLVESGGGVVQPGRSL | 11 |
| | RLSCAASGFTFSSYGMHW | |
| | VRQAPGKGLEWVAFIRYD | |
| | GSNKYYADSVKGRFTISR | |
| | DNSKNTLYLQMNSLRAED | |
| | TAVYYCKTHGSHDNWGQG | |
| | TMVTVSS | |
| VL | QSVLTQPPSVSGAPGQRV | 12 |
| | TISCSGSRSNIGSNTVKW | |
| | YQQLPGTAPKLLIYYNDQ | |
| | RPSGVPDRFSGSKSGTSA | |
| | SLAITGLQAEDEADYYCQ | |
| | SYDRYTHPALLFGTGTKV | |
| | TVL | |
| VHCDR1 | SYGMH | 13 |
| VHCDR2 | FIRYDGSNKYYADSVKG | 14 |
| VHCDR3 | HGSHDN | 15 |
| VLCDR1 | SGSRSNIGSNTVK | 16 |
| VLCDR2 | YNDQRPS | 17 |
| VLCDR3 | QSYDRYTHPALL | 18 |

TABLE 6
Briakinumab scFv-HetFc and Fab-HetFc variants

| Variant ID | HetFc 1 clone ID | HetFc 2 clone ID | Other clone ID |
|---|---|---|---|
| v23976 | CL_#18939 | CL_#12155 | CL_#18940 |
| v23977 | CL_#18942 | CL_#12155 | NA |
| v23978 | CL_#18943 | CL_#12155 | NA |
| v31807 | CL_#21417 | CL_#12155 | NA |
| v31854 | CL_#23360 | CL_#12155 | NA |
| v31855 | CL_#23361 | CL_#12155 | NA |
| v31857 | CL_#23363 | CL_#12155 | NA |

[0368] Variants were expressed in ExpiCHO™ or CHO-3E7 cells as described in Protocol 3 and Protocol 4. Initially, small-scale expression tests were performed using multiple Variant expression vector DNA mixtures with different molar ratios of the comprising Variant expression vectors. This was performed to account for differences in expression efficiency of the multiple expression vectors so that production of the complete Variant is maximized and production of incomplete variant or incorrectly formed species is minimized. Optimal molar ratios of Variant expression vector DNA were determined by visually assessing SDS-PAGE of culture supernatants for bands corresponding to the desired and undesired species.

[0369] Clarified supernatants from expression samples using optimal Variant expression vector DNA ratios were purified by protein-A affinity purification as described in Protocol 6. Following protein-A affinity purification, purity of samples was assessed by non-reducing and reducing LabChip™ CE-SDS as described in Protocol 9. Samples were further purified by SEC as described in Protocol 8.

[0370] Variants were tested for their binding to recombinant IL12 and affinities (KD) were determined by Surface Plasmon Resonance (SPR) as described in Protocol 12.

[0371] SPR results showed that the VL-(G4S)3-VH and VH-(G4)3-VL scFv-HetFc variants of Briakinumab bound recombinant IL12 with 1.8× and 3.1× higher affinity than the control Fab-HetFc v23976, respectively (Table 7). Furthermore, the affinity of the scFv for IL12 was not affected by more than 2.4×compared to the control Fab-HetFc v23976 by: a) fusion to the HetFc C-terminus via a peptide linker and protease cleavable sequence as in v31807 rather than to the N-terminus via a modified Fc hinge; b) the use of a longer GGS-(G3S)4-G linker as in v31854; c) addition of a disulfide bond (VH G44C; VL T100C) as in v31855; d) or addition of a protease cleavable linker between the VH and VL domains such as in v31857 (Table 7).

TABLE 7
SPR binding to recombinant IL12.

| Variant ID | ka (1/Ms) | kd (1/s) | KD (M) |
|---|---|---|---|
| v23976 | 3.50E+06 | 8.12E−05 | 2.32E−11 |
| v23977 | 3.88E+06 | 2.86E−05 | 7.38E−12 |
| v23978 | 2.17E+06 | 2.75E−05 | 1.27E−11 |
| v31807 | 1.85E+06 | 6.81E−05 | 3.68E−11 |
| v31854 | 1.69E+06 | 7.22E−05 | 4.30E−11 |
| v31855 | 2.48E+06 | 1.38E−04 | 5.59E−11 |
| v31857 | 3.25E+06 | 6.84E−05 | 2.11E−11 |

### Example 4: Briakinumab Mutants with Modified Affinity for IL12

[0372] Antibody-masked IL12 Fc fusion proteins may require scFvs with higher or lower affinity for IL12 depending on the desired potency reduction of the masked molecule and recovery of activity after proteolytic cleavage. To modulate the affinity of Briakinumab, we introduced single- and double-point mutations into the CDRs. CDR mutations were rationally designed by visual and ZymeCAD™ analyses of the crystal structure of Briakinumab Fab in complex with IL23 (Bloch et al. 2018, Immunity 48, 45-58; Protein Data Bank entry 5NJD). Mutations according to Kabat numbering for Briakinumab are listed in Table 8.

TABLE 8
Briakinumab scFv-HetFc modified affinity variants

| Variant ID | Mutation (Kabat) | HetFc 1 clone ID | HetFc 2 clone ID |
|---|---|---|---|
| v23977 | NA | CL_#18942 | CL_#12155 |
| v30684 | H_Y32A | CL_#22203 | CL_#12155 |
| v30686 | H_F27V | CL_#22206 | CL_#12155 |
| v30687 | H_Y52AV | CL_#22207 | CL_#12155 |
| v30688 | H_R52E | CL_#22208 | CL_#12155 |
| v30689 | H_R52E_Y52AV | CL_#22209 | CL_#12155 |
| v30690 | H_H95D | CL_#22211 | CL_#12155 |
| v30691 | H_G96T | CL_#22212 | CL_#12155 |
| v30693 | H_H98A | CL_#22214 | CL_#12155 |

[0373] Methods

[0374] Variants were designed in the scFv-HetFc format, expressed in ExpiCHO™ and purified as described in Example 3. The affinity of variants for recombinant IL12 was determined by SPR as described in Example 3. The thermal stability of variants was assessed by DSC as described in Protocol 11.

[0375] Results

[0376] Variants showed a range of affinities (KD) for IL12 that were reduced by ˜8.5 to 145.8×compared to the control scFv-HetFc v23977 (Table 9). While association rates were increased somewhat by up to ˜2.6×, the dissociation rates (k-off) were increased by as much as ˜267.9×, leading to decreased KDs overall.

[0377] The thermal stability of the mutated variants was maintained, with no more than a 0.7° C. reductions in Tm compared to WT control variant v23977. Variants containing the H_R52E mutation showed increased stability by 2-3° C. compared to v23977.

TABLE 9
Binding kinetics and thermal stability of Briakinumab
scFv-HetFc modified affinity variants

| Variant ID | ka (1/Ms) | kd (1/s) | KD (M) | Tm (° C.) |
|---|---|---|---|---|
| v23977 | 4.98E+06 | 6.27E−05 | 1.20E−11 | 63.7 |
| v30684 | 9.56E+06 | 1.68E−02 | 1.75E−09 | 63.0 |
| v30686 | 8.48E+06 | 2.12E−03 | 2.15E−10 | 63.5 |
| v30687 | 1.04E+07 | 2.01E−03 | 1.88E−10 | 63.2 |
| v30688 | 5.37E+06 | 7.78E−04 | 1.40E−10 | 66.7 |
| v30689 | 9.14E+06 | 8.36E−03 | 9.25E−10 | 65.7 |
| v30690 | 6.82E+06 | 3.77E−03 | 6.00E−10 | 65.1 |
| v30691 | 1.28E+07 | 6.14E−03 | 4.66E−10 | 65.8 |
| v30693 | 7.90E+06 | 8.14E−04 | 1.02E−10 | 63.1 |

### Example 5: Design of Antibody-Masked IL12 HetFc Fusion Proteins

[0378] The Briakinumab scFvs described in Examples 3 and 4 were used as masks and combined with the parental non-masked IL12 HetFc fusion proteins described in Example 1 to design antibody-masked IL12 HetFc fusion proteins.

[0379] Briefly, an scFv in either the VH-VL or VL-VH orientation was fused via a peptide linker to an available terminus of a parental non-masked IL12 HetFc fusion protein. A protease cleavage sequence as identified in Example 2 was incorporated into the linker between the IL12 HetFc fusion protein and the mask so that the mask would be released by protease cleavage, or between the masked IL12 HetFc fusion protein and IL12 so that the IL12 moiety would be released by protease cleavage. In some cases, an additional protease cleavage sequence was incorporated into the linker between the VH and VL domains of the scFv, which may aid in recovery of IL12 activity by destabilizing the scFv upon protease cleavage and accelerating its release. Linker lengths were determined by measuring distances between potential N- and C-terminal fusion sites in the crystal structure of the Briakinumab/IL23 complex (PDB code 5NJD, Bloch et al. (2018) Immunity 48: 45-58). Specific constructs are summarized in Table 10 and diagrammed in FIG. 5 to FIG. 9 and FIG. 32.

[0380] Because Briakinumab binds to the shared p40 subunit of IL12 and IL23, it is understood that antibody-masked IL23 constructs with the same architectures as variants described in Table 10 could be created by replacing the IL12 p35 subunit with the IL23 p19 subunit.

TABLE 10
Briakinumab scFv antibody-masked IL12 HetFc fusion proteins

| | | | |
|---|---|---|---|
| Variant ID | HetFc 1 clone ID | HetFc 2 clone ID | Other clone ID |

Briakinumab-masked IL12 HetFc fusion
proteins derived from parental v22946

| | | | |
|---|---|---|---|
| v29278 | CL_#21451 | CL_#17877 | CL_#17871 |
| v29240 | CL_#17877 | CL_#12153 | CL_#21415 |
| v29259 | CL_#17877 | CL_#12153 | CL_#21446 |
| v29279 | CL_#21452 | CL_#12153 | CL_#17871 |

Briakinumab-masked IL12 HetFc fusion
proteins derived from parental v22948

| | | | |
|---|---|---|---|
| v29277 | CL_#21451 | CL_#17879 | CL_#17872 |
| v29235 | CL_#17879 | CL_#12153 | CL_#21419 |
| v29258 | CL_#17879 | CL_#12153 | CL_#21447 |
| v29234 | CL_#21418 | CL_#12153 | CL_#17872 |

Briakinumab-masked IL12 HetFc fusion
proteins derived from parental v22945

| | | | |
|---|---|---|---|
| v29231 | CL_#17875 | CL_#12153 | CL_#21415 |
| v29232 | CL_#21416 | CL_#12153 | CL_#17871 |
| v29233 | CL_#21417 | CL_#17875 | CL_#17871 |
| v29257 | CL_#17875 | CL_#12153 | CL_#21446 |

Briakinumab-masked IL12 HetFc fusion
proteins derived from parental v23086

| | | | |
|---|---|---|---|
| v29237 | CL_#21417 | CL_#17942 | CL_#17872 |
| v29238 | CL_#21421 | CL_#12153 | CL_#17872 |
| v29239 | CL_#17942 | CL_#12153 | CL_#21419 |

Briakinumab-masked IL12 HetFc fusion
proteins derived from parental v22951

| | | | |
|---|---|---|---|
| v29243 | CL_#21423 | CL_#12153 | NA |
| v29244 | CL_#21417 | CL_#17876 | NA |
| v31277 | CL_#22735 | CL_#22279 | NA |
| v32041 | CL_#23512 | CL_#22279 | NA |
| v32299^{a} | CL_#23364 | CL_#22279 | NA |
| v32453 | CL_#23512 | CL_#23710 | NA |
| v32862^{b} | CL_#24224 | CL_#22279 | NA |
| v35426^{c} | CL_#26498 | CL_#22279 | NA |
| v35436^{d} | CL_#26503 | CL_#22279 | NA |

^{a}derived from v31277 (see FIGS. 2A-2B) but containing the H_Y32A mutation to reduce mask affinity.
^{b}derived from v31277 (see FIGS. 2A-2B) but with an alternate non-cleavable linker between the scFv VH and VL domains.
^{c}derived from v31277 (see FIGS. 2A-2B) but with an alternate non-cleavable linker between the scFv VH and VL domains, and the H_F27V mutation to reduce mask affinity.
^{d}derived from v32862 but with an alternate non-cleavable linker between the HetFc and scFv VH domains.

### Example 6: Design of Receptor-Masked IL12 HetFc Fusion Proteins

[0381] In addition to antibodies that bind IL12 as described in Example 3, fragments of the cognate IL12 receptors, IL12Rβ1 or IL12Rβ2, can be used as masking moieties when fused to parental non-masked IL12 HetFc fusion proteins. Receptor-masked IL12 HetFc fusion proteins were designed by linking a polypeptide chain of a portion of the ECD of human IL12Rβ2 to the parental non-masked IL12 HetFc fusion proteins described in Example 1, with a protease cleavage sequence as identified in Example 2 incorporated into either the linker between the IL12 HetFc fusion protein and the mask so that the mask is released by protease cleavage, or between the masked IL12 HetFc fusion protein and IL12 so that the IL12 moiety is released by protease cleavage. Specific constructs are summarized in Table 11 and diagrammed in FIG. 5 to FIG. 9.

[0382] It is understood that receptor-masked IL23 variants with the same architectures as variants described in Table 11 could be created by replacing the IL12 p35 subunit with the IL23 p19 subunit and replacing the portion of the IL12Rβ2 ECD used as a mask with a corresponding portion of the IL23R ECD.

TABLE 11
IL12Rβ2 receptor-masked IL12 HetFc fusion proteins:

| | | | |
|---|---|---|---|
| Variant ID | HetFc 1 clone ID | HetFc 2 clone ID | Other clone ID |

IL12Rβ2-masked IL12 HetFc fusion
proteins derived from parental v22951

| | | | |
|---|---|---|---|
| v24013 | CL_#18953 | CL_#17876 | NA |
| v24019 | CL_#12153 | CL_#18957 | NA |
| v32044 | CL_#23513 | CL_#22279 | NA |
| v32045* | CL_#22672 | CL_#22279 | NA |
| v32455 | CL_#23513 | CL_#23710 | NA |

IL12Rβ2-masked IL12 HetFc fusion
proteins derived from parental v23086

| | | | |
|---|---|---|---|
| v24014 | CL_#18953 | CL_#17942 | CL_#17872 |

IL12Rβ2-masked IL12 HetFc fusion
proteins derived from parental v22945

| | | | |
|---|---|---|---|
| v24015 | CL_#18953 | CL_#17875 | CL_#17871 |

IL12Rβ2-masked IL12 HetFc fusion
proteins derived from parental v22948

| | | | |
|---|---|---|---|
| v24016 | CL_#18954 | CL_#17879 | CL_#17872 |

IL12Rβ2-masked IL12 HetFc fusion
proteins derived from parental v22946

| | | | |
|---|---|---|---|
| v24017 | CL_#18954 | CL_#17877 | CL_#17871 |
| v24018 | CL_#18956 | CL_#12153 | CL_#17871 |

*Identical to v24013 but with the N-terminal R of p35 removed. In order to prevent cleavage between the Gly-Ser linker and the p35 N-terminus, the N-terminal arginine of p35 was removed such that the p35 sequence started with Asn2 (see also Example 8).

### Example 7: Production and Characterization of IL12 HetFc Fusion Proteins

[0383] This Example describes the expression and purification of parental and masked IL12 HetFc fusion proteins, and their characterization for monodispersity by UPLC-SEC.

[0384] Methods

[0385] Small-scale expression tests were performed in Expi293™, CHO-3E7, or HEK293-6E cells as described in Example 3 using multiple Variant expression vector DNA mixtures with different molar ratios of the comprising Variant expression vectors. Optimized molar ratios of Variant expression vector DNA for each Variant were then used for larger Expi293™, CHO-3E7, or HEK-293 expressions as described in Protocols 2, 4, and 5, and proteins were purified by pA and SEC as described in Protocols 6 and 8. UPLC-SEC post pA and post SEC was performed as described in Protocol 10.

[0386] Results

[0387] Yields post protein-A purification per L of transfection culture were in the range of 141-248 mg for parental IL12 HetFc fusion proteins, 72-182 mg for receptor-masked IL12 HetFc fusion protein variants and ˜70-418 mg for antibody-masked IL12 HetFc fusion variants. Exceptions were parental variant v23087 and masked variants v24016 and v24019, which had little to no visible protein expression by SDS-PAGE at small scale and were not scaled-up, and masked variants v32862 and v35426, which were not expressed in this group. UPLC-SEC analysis of protein-A purified material showed that variants where IL12 is fused to the N-terminus of the Fc (derived from parental variants v22946 and v22948) generally showed higher levels of high molecular weight species compared to variants where IL12 was fused to the C-terminus of the Fc (derived from parental variants v22945, v23086, and v22951). The UPLC-SEC profile of v29258 was very heterogeneous and this variant was not SEC purified. After SEC purification, variants displayed >85% monodispersity by UPLC-SEC, except for parental variant v22949, which was recovered with poor yield from SEC purification and showed ˜53% monodispersity by UPLC-SEC. Due to their poor expression or biophysical behavior, parental variants v23087 and v22949 were not used to design masked variants.

[0388] Antibody-masked variants that possess a second protease cleavage site incorporated between the scFv VH and VL domains, e.g. v31277 and v32299, displayed additional bands in reducing LabChip™ CE-SDS analysis that correspond to cleavage between the VH and VL. This pre-cleavage was observed in samples expressed from CHO cultures but not from HEK cultures, and corresponded to between 1.6 and 7.5% of the total HetFc-mask protein chain. One sample of v31277 that displayed 3.9% pre-cleavage by reducing LabChip™ CE-SDS analysis was also assessed by intact LC-MS according to Protocol 13 and displayed a 6% apparent abundance of the pre-cleaved species, and the location of pre-cleavage was confirmed to be within the matriptase cleavage motif between the scFv VH and VL.

### Example 8: Matriptase Cleavage of IL12 HetFc Fusion Proteins

[0389] To test if protease treatment would effectively cleave at the designed cleavage sequences within the masked IL12 HetFc fusion proteins of various geometries, the masked variants were digested with matriptase. Cleavage was assessed by LabChip™ CE-SDS analysis. Parental non-masked variants were also digested with matriptase to assess whether any non-specific cleavage events occur in IL12 or the HetFc.

[0390] Methods

[0391] Masked IL12 HetFc fusion proteins were incubated for 24 hours with matriptase (R&D Systems) at a molar ratio of 1:50 (matriptase:Protein) in a total reaction volume of 25 μL PBS-T pH 7.4 at 37° C. Non-reducing and reducing LabChip™ CE-SDS analysis was carried out to assess the degree of digestion, and LC/MS was performed as described in Protocol 14 to identify the locations of cleavage.

[0392] Results

[0393] Complete cleavage was observed by reducing LabChip™ CE-SDS analysis for all variants tested, as assessed by the disappearance of bands corresponding to the full-sized protein chains containing designed cleavage sequences compared to the same variant without matriptase digestion, and the appearance of bands corresponding approximately in MW to the expected species post-cleavage. Cleavage of IL12 outside of designed protease cleavage sequences was also observed by CE-SDS, and the cleavage sites were determined by LCMS. IL12 was cleaved within the p40 domain in a loop of sequence . . . QGKSK/REKK . . . (SEQ ID NO:19; residues 256-264 of SEQ ID NO:22) (cleavage location indicated by “/”) also known as the heparin-binding loop (Hasan et al. J Immunology 1999; 162: 1064-1070), and at the N-terminus of the p35 domain in variants where p35 was fused with a glycine-serine type linker to the HetFc or the p40 subunit, such as in v22951 ( . . . GGSR/NLPV . . . ) (see clone 17876 as set forth in SEQ ID NO:25).

### Example 9: Effects of IL12 HetFc Fusion Proteins+/−Matriptase on NK Cell Relative Abundance In Vitro

[0394] To determine the cytokine activity of masked and non-masked IL12 HetFc fusion proteins, NK cells were stimulated with purified variants, with or without matriptase pre-treatment, and relative cell abundance was measured as described below.

[0395] Methods

[0396] NK cell culture: Minimum Essential Medium alpha (ThermoFisher, Waltham, Mass.) supplemented with 0.1 mM 2-mercaptoethanol (ThermoFisher, Waltham, Mass.), 100 U/mL recombinant IL2 (Peprotech, Rocky Hill, N.J.), 12.5% human AB off-the-clot serum (Zen-Bio Inc., Research Triangle Park, N.C.), and 12.5% fetal bovine serum (ThermoFisher, Waltham, Mass.). Cells were maintained in vertical T75 flasks (VWR, Radnor, Pa.) an incubator at 37° C. and 5% carbon dioxide. The cells were replenished with fresh media with IL2 every 3 days.

[0397] Sample preparation: One day prior to the assay, two aliquots of each variant sample were thawed from −80° C. storage. Recombinant human matriptase was added to a single aliquot of each sample (R&D Systems, Minneapolis, Minn.) at a 50:1 sample to enzyme ratio, vortexed to mix, and incubated overnight at 37° C. for cleavage as described in Example 8.

[0398] NK Cell Assay: NK cells were cultured as above in growth medium without IL2 (assay media) for 12 hours, harvested in a 50 mL falcon tube and spun down at 400×G for 3 minutes to pellet cells. Cells were resuspended in assay media to 400 million cells/mL and 10,000 cells, or 25 uL/well, were added to assay plates. Variant samples were titrated in triplicate at 1:5 dilution in 25 ul directly in 384-well black flat bottom assay plates (ThermoFisher, Watham, Mass.). Recombinant human IL12 (Peprotech, Rocky Hill, N.J.) was included as a positive control. Plates were incubated for 3 days at 37° C. and 5% carbon dioxide. Post incubation, 25 uL/well of supernatant was transferred to non-binding 384-well plates (Greiner-Bio-One, Kremsmünster, Austria) and stored at −80° C.

[0399] Relative Cell Abundance Determination: After supernatant removal, CellTiter-Glo® Luminescent Cell Viability reagent (Promega, Madison, Wis.) was added to plates at 25 uL/well and plates were incubated at room temperature away from light for 30 minutes. Following incubation, plate luminescence was scanned on the BioTek synergy H1 plate reader (BioTek, Winooski, Vt.). Graphs were generated using GraphPad Prism version 7.0d for Mac OS X (GraphPad Software, La Jolla Calif. USA).

[0400] Results

[0401] The relative abundance of NK cells after incubation in the presence of masked and parental IL12 HetFc fusion proteins treated+/−matriptase are shown in FIG. 10A-FIG. 15E and summarized in Table AA.

[0402] Parental non-masked IL12 HetFc fusion proteins had potencies within < or >10-fold of recombinant IL12 on relative NK cell abundance. Matriptase treatment of parental variants reduced their potency by no more than 6-fold compared to recombinant IL12. Antibody and receptor masked IL12 HetFc fusion proteins showed reduced activity on relative NK cell abundance compared to their corresponding non-masked parental variants (FIG. 10A-FIG. 15E).

[0403] The maximum reduction in potency on relative cell abundance was observed with antibody masked variants v31277 and v32453 compared to their common parental variant v22951. Variant v31277 possesses a first cleavage site between the HetFc and the scFv mask and a second cleavage site between the scFv VH and VL. In a first experiment using v31277 produced from Expi293™ culture, the sample showed an almost complete reduction in potency compared to parental variant v22951, and recovered potency to within 4-fold of v22951 upon matriptase treatment (FIGS. 10A-10C). In a second experiment using v31277 produced from a CHO-3E7 culture, the sample showed a 743-fold reduction in potency compared to v22951 and recovered potency to within 4-fold of v22951 upon matriptase treatment (FIG. 11A). The difference in masking efficiency between these samples is likely attributable to pre-cleavage of this variant between the scFv VH and VL domains that was observed during production in CHO-produced but not HEK-produced samples, as described in Example 7. In comparison, variant v32453 possesses a cleavage site only between the HetFc and scIL12, which does not display any pre-cleavage when produced in CHO culture, and displayed an 147-fold reduction in potency compared to v22951 and recovered equivalent potency to 22951 after matriptase treatment (FIG. 11B). Variant v32299 is identical to v31277 but includes the H_Y32A mutation that weakens the scFv mask affinity (KD) for IL12 by ˜146-fold, as described in Example 4. When produced in CHO-3E7, v32299 showed pre-cleavage between the scFv VH and VL similar to v31277, and displayed a 53-fold reduction in potency on relative NK cell abundance compared to v22951 and recovered equivalent potency to 22951 after matriptase treatment (FIG. 11C). The control variant v32041, identical to v31277 but lacking protease cleavage motifs, demonstrated a 1238-fold reduction in potency compared to v22951 and, as expected, a minimal potency shift when pre-treated with matriptase (FIG. 11D). The maximum reduction in potency of an antibody masked variant derived from a parental non-masked variant other than v22951 was 317-fold for v29279, which was derived from parental v22946. After matriptase treatment, IL12 activity potency was recovered within 18-fold of matriptase-treated v22946 (Error! Reference source not found.12H).

[0404] Among receptor-masked variants, the maximum reduction in potency on relative cell abundance was observed for variants v32045 and v32455 compared to their parental variant v22951. These variants differ in the placement of the matriptase cleavage site, which is between the HetFc and the receptor mask for v32045, and between the HetFc and scIL12 for v32455. In one experiment, v32045 displayed 133-fold reduced potency compared to v22951 (FIGS. 13A-13C), and in a second experiment, v32455 showed 3-fold reduced potency compared to v32045 (FIG. 14A). Both variants recovered potencies comparable to v22951 after matriptase treatment. In this case, neither variant displayed observable pre-cleavage, so the improved masking of v32455 compared to v32045 may be due to its longer linker between the HetFc and scIL12 allowing a more stable formation of the masked complex. The control variant v32044, identical to v32045 but lacking cleavage motifs, demonstrated a 295-fold reduction in potency compared to v22951 and, as expected, a minimal potency shift when pre-treated with matriptase (FIG. 14B). The maximum reduction in potency of a receptor-masked variant derived from a parental non-masked variant other than v22951 was 24-fold for v24014, which was derived from parental v23 806. After matriptase treatment potency was recovered to approximately 4-fold above matriptase-treated v23086 (FIG. 15E).

[0405] The range of masking efficiencies observed for variants that differ only in fusion configuration (e.g. excluding mutations that modulate mask affinity, cytokine potency, etc.) demonstrates the importance of geometry in constructing masked cytokine fusion proteins. While it is known in the art that the configuration of fusion proteins may impact production efficiency and stability, it is not predictable how configuration affects these characteristics, nor is it guaranteed that they correlate to the desired function of the purified product. Despite all fusions in this work being constructed with linkers designed to sufficiently bridge distances between termini of component domains based on structural analyses, there were differences in masking efficiencies even among variants with similar biophysical characteristics. It is evident that the sequence of fusions between masks, cytokines, and HetFc can have unexpected or unpredictable impacts on function, which may be due to more complex conformational dynamics causing strain or non-specific interactions between the component protein domains or linkers.

TABLE AA
Fold potency reduction and IL12 activity recovery-
Relative Abundance of NK Cells

| | | | | | Variant | Var. +M | |
|---|---|---|---|---|---|---|---|
| | | | | | EC50/Parental | EC50/Parental | |
| | | | | | Variant EC50 | Var. +M EC50 | |
| | | | | | Fold Change in | X Change in IL12 | |
| | | | | Heparin | Potency compared | activity recovery | |
| | Unmasked | | Cleavage Site | Binding | to Parental | post cleavage vs | |
| Variant | Parental | Mask Type | Location (—/—) | Mutation | Variant | Parental Var. | FIG. |
| 29232 | 22945 | ScFv | HetFc-p35—/—Mask | | 222 | 62 | 12B |
| 29257 | 22945 | ScFv | Mask—/—p40 | | 194 | 31 | 12D |
| 29231 | 22945 | ScFv | p40—/—Mask | | 168 | 14 | 12A |
| 29233 | 22945 | ScFv | HetFc—/—Mask | | 76 | 32 | 12C |
| 24015 | 22945 | Receptor | HetFc—/—Mask | | 7 | 0.35 | 15A |
| 29279 | 22946 | ScFv | Mask—/—p35-HetFc | | 317 | 18 | 12H |
| 29259 | 22946 | ScFv | Mask—/—p40 | | 184 | 29 | 12F |
| 29240 | 22946 | ScFv | p40—/—Mask | | 125 | 2 | 12E |
| 29278 | 22946 | ScFv | Mask—/—HetFc | | 113 | 21 | 12G |
| 24018 | 22946 | Receptor | Mask—/—p35-HetFc | | 22 | 0.14 | 15C |
| 24017 | 22946 | Receptor | Mask—/—HetFc | | 6 | 0.05 | 15B |
| 29234 | 22948 | ScFv | Mask—/—p40-HetFc | | 56 | 5 | 12M |
| 29235 | 22948 | ScFv | p35—/—Mask | | 31 | 7 | 12N |
| 29277 | 22948 | ScFv | Mask—/—HetFc | | 1 | 4 | 12O |
| 32039 | 22951 | ScFv | HetFc—/—Mask, | (+) | <10000 | 8 | 17A |
| | | | Mask (VH—/—VL) | | | | |
| 32040 | 22951 | ScFv | No Cleavage | (+) | <10000 | NC | 17B |
| 32454 | 22951 | ScFv | HetFc—/—scIL12 | (+) | <10000 | 6 | 17C |
| 31277 | 22951 | ScFv | HetFc—/—Mask, | | <10000 | 4 | 10 |
| | | | Mask (VH—/—VL) | | | | |
| 32042 | 22951 | Receptor | HetFc—/—Mask | (+) | 1595 | 1.81 | 17D |
| 32043 | 22951 | Receptor | No Cleavage | (+) | 1583 | 127 | 17E |
| 32041 | 22951 | ScFv | No Cleavage | | 1238 | 77 | 11D |
| 29244 | 22951 | ScFv | HetFc—/—Mask | | 1022 | 3 | 12J |
| 29243 | 22951 | ScFv | HetFc-scIL12—/—Mask | | 867 | 3 | 12I |
| 31277 | 22951 | ScFv | HetFc—/—Mask, | | 743 | 4 | 11A |
| | | | Mask (VH—/—VL) | | | | |
| 32044 | 22951 | Receptor | No Cleavage | | 295 | 91 | 14B |
| 32453 | 22951 | ScFv | HetFc—/—scIL12 | | 147 | 1 | 11B |
| 32045 | 22951 | Receptor | HetFc—/—Mask | | 133 | 1 | 13 |
| 24013 | 22951 | Receptor | HetFc—/—Mask | | 94 | 0.78 | 15D |
| 32299 | 22951 | ScFv | HetFc—/—Mask, | | 53 | 1 | 11C |
| | | | Mask (VH—/—VL) | | | | |
| 32455 | 22951 | Receptor | HetFc—/—scIL12 | | 18 | 1 | 14A |
| 30812 | 30806 | No Mask | No Cleavage | (+) | 11 | | 16A |
| 30811 | 30806 | No Mask | No Cleavage | (+) | 9 | | 16A |
| 30816 | 30806 | No Mask | No Cleavage | (+) | 7 | | 16B |
| 30818 | 30806 | No Mask | No Cleavage | (+) | 6 | | 16A |
| 32045 | 22951 | Receptor | HetFc—/—Mask | | 6 | 1 | 14A |
| 30815 | 30806 | No Mask | No Cleavage | (+) | 5 | | 16B |
| 30814 | 30806 | No Mask | No Cleavage | (+) | 3 | | 16B |
| 30813 | 30806 | No Mask | No Cleavage | (+) | 2 | | 16B |
| 30806 | 22951 | No Mask | No Cleavage | | 1 | | 16A |
| 29239 | 23806 | ScFv | p35—/—Mask | | 236 | 3 | 12L |
| 29237 | 23806 | ScFv | HetFc—/—Mask | | 67 | 1 | 12K |
| 24014 | 23806 | Receptor | HetFc—/—Mask | | 24 | 1 | 15E |

[0406] These results suggest that parental non-masked IL12 HetFc fusions have activity within a similar potency range to recombinant IL12, and that ScFv or receptor masked IL12 HetFc fusions: 1) attenuate or block IL12 activity; 2) recover IL12 activity when cleaved by proteases, and 3) can be modified to alter the efficiency of the mask and recovery of IL12 activity.

### EXAMPLE 10: SEQUENCES OF IL12 WITH REDUCED AFFINITY FOR HEPARIN

[0407] IL12 can be purified by heparin-affinity chromatography (Jayanthi et al. Protein Ex Purif 2014; 102:76-84) and the presence of heparin, a negatively charged sugar polymer, enhances its in vitro activity (Jayanthi et al. Scientific Reports 2017). A positively charged loop of sequence QGKSKREKK in the IL12 p40 subunit is likely responsible for binding heparin (see SEQ ID NO:19 and amino acids 256-264 of SEQ ID NO:22). In this Example, residues within this loop were mutated or replaced with loops of shorter length and various net charges to lower the binding affinity of IL12 to heparin and attenuate the potency of IL12. In addition, the mutants may provide resistance to cleavage by matriptase, which was observed within this loop as described in Example 8, and may improve pharmacokinetics due to reduced non-specific membrane binding.

TABLE 12
Heparin-binding loop sequences of IL12 p40

| | HetFc 1 | HetFc 2 | p40 heparin | SEQ |
|---|---|---|---|---|
| Variant | clone | clone | binding | ID |
| ID | ID | ID | loop sequence | NO: |
| v30806 | CL #22279 | CL #12153 | QGKSKREKK | 19 |
| v30811 | CL #22296 | CL #12153 | QGSEK | 244 |
| v30812 | CL #22295 | CL #12153 | KDQTE | 245 |
| v30813 | CL #22294 | CL #12153 | QDDSE | 246 |
| v30814 | CL #22293 | CL #12153 | QDQTD | 247 |
| v30815 | CL #22292 | CL #12153 | QGEKK | 248 |
| v30816 | CL #22289 | CL #12153 | RDDSE | 249 |
| v30817 | CL #22290 | CL #12153 | QGSQEKK | 250 |
| v30818 | CL #22291 | CL #12153 | QGESKQEKK | 251 |

[0408] Methods

[0409] Non-masked IL12 HetFc fusions were designed based on parental variant v22951 with mutations in the heparin binding loop (Table 12), produced in Expi293™ as described in Protocol 2, and purified by pA and SEC as described in Protocol 7 and Protocol 8.

[0410] The p35 sequence used for the scIL12 sequences containing the loop grafts had the N-terminal arginine removed and started with Asn2, to prevent cleavage between the Gly-Ser linker and p35 N-terminus as described in Example 8. Variant v30806 contains only this modification as compared to parental variant v22951 and contains the wild type heparin binding loop.

[0411] Variants were assessed by UPLC-SEC post pA as described in Protocol 10 for their percentage of high molecular weight species, and melting temperatures (Tm) were determined by DSC as described in Protocol 11.

[0412] Variants were tested for susceptibility to matriptase cleavage as described in Example 8, with additional digest timepoints assessed by reducing LabChip™ CE-SDS at 1h and 6h.

[0413] Heparin binding of variants was assessed by injecting 0.2 mg of sample on a 1 mL heparin HiTrap Column (GE Healthcare) with running buffer 10 mM NaPhosphate, pH 7.4, followed by a wash step for 5 column volumes (CV) and elution in running buffer supplemented with a linear gradient of 0 to 1 M NaCl over 30 CV. The affinity of variants for heparin was compared by measuring the percentage of protein in the elution peak vs. percentage of protein in the flow through based on A280, as well as by comparing the elution column volume.

[0414] The relative abundance of NK cells treated with variants containing mutated heparin binding loops was assessed as described in Example 9.

[0415] Results

[0416] Table 13 shows results for pA yield per L of cell culture, biophysical properties, and heparin column binding characteristics of variants with mutated heparin binding loops. All variants exhibited WT stability and yields post pA compared to v30806. All variants exhibited decreased binding affinity to the heparin column, evident either by their earlier elution CV compared to the WT v30806, which eluted at 25.5 mL CV, or by their percentage of protein that did not bind to the column and remained in the flow through. For example, v30812 eluted at 17.2 mL CV and only 58.5% of the protein loaded was eluted from the column during the salt gradient, 41.5% of protein did not bind and remained in flow through and thus did not bind to heparin. The variants displayed varying resistance to matriptase digestion, up to complete resistance to 24h incubation with matriptase. Variant v30806 displayed complete cleavage at 1h, variants v30811 through v30816 displayed no cleavage up to 24h, and variants v30817 and v30818 displayed increasing cleavage beginning at 1h and proceeding to near completion at 24h. Variants did not display banding corresponding to cleavage at the N-terminus of p35 as described in Example 8 for variants that do possess Arg 1 of p35.

[0417] The relative abundance of NK cells after incubation in the presence of heparin binding mutant IL12 HetFc fusion proteins is shown in FIGS. 16A-16B and is summarized in Table AA. Variants 22951 and 30806 had equivalent potency on relative abundance of NK cells, indicating that removal of the N-terminal arginine from variant 22951 to create variant 30806 did not affect activity (FIG. 16A). Introduction of heparin binding mutations resulted in maximum attenuation of potency of 11-fold for variant 30812 compared to 30806 whereas other variants showed potency attenuation between 2 to 9-fold (FIG. 16). Thus, while there was some reduction in IL12 activity observed by introduction of mutations in the heparin binding site, given the high potency and toxicity of IL12, this reduction may be considered acceptable in order to further reduce the potency of masked IL12 fusions.

TABLE 13
Yield, biophysical properties, and
heparin column binding of mutants

| | | UPLC-SEC | | Heparin | A280 |
|---|---|---|---|---|---|
| Variant | pA yield per L | HMW | Tm | Elution | Elution/ |
| ID | culture (mg) | post pA (%) | (° C.) | CV (mL) | FT (%) |
| v30806 | 384.4 | 9.4 | 64.9 | 25.5 | 96.4 |
| v30811 | 478.4 | 19.4 | 64.8 | 18.4 | 90.9 |
| v30812 | 416.4 | 7.4 | 65.7 | 17.2 | 58.5 |
| v30813 | 450.0 | 28.2 | 65.0 | 16.3 | 10.0 |
| v30814 | 420.4 | 19.3 | 65.2 | 17.4 | 41.2 |
| v30815 | 398.8 | 25.2 | 63.1 | 19.8 | 89.7 |
| v30816 | 368.4 | 29.8 | 64.6 | 17.1 | 18.4 |
| v30817 | 371.6 | 18.8 | 65.2 | 19.5 | 98.3 |
| v30818 | 449.6 | 7.3 | 65.4 | 19.5 | 96.2 |

### Example 11: Design, Production and Testing of Masked IL12 HetFc Fusion Proteins with Reduced Affinity for Heparin

[0418] To determine the effect of a mutated heparin loop and associated IL12 attenuation on the potency of masked IL12 HetFc fusions proteins, the mutated heparin loop sequence from v30818 (Table 12) was applied to select masked variants, and proteins were produced and tested for their effects on NK cell relative abundance.

[0419] Antibody and Receptor-masked IL12 HetFc fusion proteins were designed as described in Examples 5 and 6, where the variants v32039, v32040, v32454, v32042, and v32043 below (Table 14) are equivalent to variants v31277, v32041, v32453, v32045, and v32044, respectively, but with p40 heparin-binding loops modified as in v30818.

TABLE 14
Masked IL12 HetFc fusion proteins with heparin loop mutations

| | | |
|---|---|---|
| Variant ID | HetFc 1 clone ID | HetFc 2 clone ID |

Briakinumab-masked IL12 HetFc fusion
proteins derived from parental v22951

| | | |
|---|---|---|
| v32039 | CL_#22735 | CL_#22291 |
| v32040 | CL_#23512 | CL_#22291 |
| v32454 | CL_#23512 | CL_#23711 |

IL12Rβ2-masked IL12 HetFc fusion
proteins derived from parental v22951

| | | |
|---|---|---|
| v32042 | CL_#22672 | CL_#22291 |
| v32043 | CL_#23513 | CL_#22291 |

### Methods

[0420] Proteins were produced and characterized as described in Example 7, tested for matriptase cleavage as described in Example 8, and tested for NK cell activity as described in Example 9.

### Results

[0421] Yields and UPLC-SEC purity of masked variants containing the heparin loop mutations were comparable to the corresponding variants with wild-type heparin binding loops as described in Example 7. Variant v32039, which contains a second matriptase cleavage motif between the scFv VH and VL like v31277, also displayed a small amount of pre-cleavage as shown by reducing LabChip™ CE-SDS analysis, corresponding to 1.3% of the total HetFc-mask protein chain. All variants were fully cleaved by overnight treatment with matriptase as described in Example 8.

[0422] The relative abundance of NK cells after incubation in the presence of masked IL12 HetFc fusion proteins with heparin loop mutations treated+/−matriptase are summarized in FIGS. 17A-17E and Table AA. In general, variants with heparin loop mutations displayed similar masking and unmasking behavior to the corresponding variants with wild-type heparin loops but with overall decreased potency, as expected based on the reduced potency of the non-masked variant v30818 with a mutated heparin loop compared to v30806 with the wild-type loop (FIGS. 16A-16B).

[0423] The variant v32039, identical to v31277 but containing the heparin loop replacement, demonstrated a close to complete reduction in potency compared to the corresponding non-masked parental variant with a wild-type heparin binding loop, v22951, and recovered to within 8-fold of v22951 potency when pre-treated with matriptase (FIG. 17A).

[0424] The variant v32040, identical to v32041 (lacking a protease cleavage site) but containing the heparin loop replacement, demonstrated a close to complete reduction in potency compared to v22951 and, as expected, a minimal potency shift when pre-treated with matriptase (FIG. 17B).

[0425] The variant v32454, identical to v32453 (cleavage site only between HetFc and scIL12) but containing the heparin loop replacement, demonstrated a complete reduction in potency and recovered to within 6 fold of v22951 potency when pre-treated with matriptase (FIG. 17C).

[0426] The variant v32042, identical to v32045 but containing the heparin loop replacement, demonstrated a 1595-fold reduction in potency compared to v22951 and recovered to within 2-fold of v22951 potency when pre-treated with matriptase (FIG. 17D).

[0427] The variant v32043, identical to v32044 (lacking a protease cleavage site) but containing the heparin loop replacement, demonstrated an 1583-fold reduction in potency compared to v22951 and, as expected, a minimal potency shift when pre-treated with matriptase (FIG. 17E).

[0428] These data demonstrate that heparin binding loop mutations reduce the potency of masked IL12 HetFc variants compared to their corresponding variants having wild-type heparin binding loops by a greater amount in the masked form than in the non-masked form after cleavage. Thus, antibody and receptor masks function synergistically with IL12 attenuation in the context of IL12 HetFc fusion proteins to broaden the potency shift before and after mask removal by protease cleavage.

### Example 12: CD8+ T-Cell IFNγ Release after Incubation with IL12 HetFc Fusion Proteins+/−Matriptase

[0429] In addition to NK cells, CD8+ T cells are an important target population for IL12. The potency of select variants derived from the parental variant v22951 on CD8+ T cells was assessed by IFNγ release.

[0430] Methods

[0431] CD8+ T Cell Assay: CD8+ T cells were thawed, stimulated with anti-CD3/CD28 dynabeads (ThermoFisher, Waltham, Mass.) at a cell to bead ratio of 10:1, and plated in 384-well black flat bottom assay plates (ThermoFisher, Watham, Mass.) at 30,000 cells/well in 30 ul RPMI1640 (Gibco)+10% FBS (ThermoFisher)+1% Pen-Strep (Gibco). Plates were incubated overnight at 37° C. and 5% carbon dioxide. The following day, samples were prepared as below and 30 ul were added to CD8+ T cells. Plates were incubated for 3 days at 37° C. and 5% carbon dioxide. Post incubation, 15 uL/well of supernatant was transferred to non-binding 384-well plates (Greiner-Bio-One, Kremsmünster, Austria) and stored at −80° C.

[0432] Sample preparation: 2 aliquots of variant or control samples were thawed from −80° C. storage the day prior to the assay. Recombinant human matriptase was added to a single aliquot of each sample (R&D Systems, Minneapolis, Minn.) at a 50:1 sample to enzyme ratio and vortexed to mix. Samples were titrated in triplicate at 1:20 dilution in 100 ul in non-binding 384-well plates (Greiner-Bio-One, Kremsmünster, Austria). Recombinant human IL12 (Peprotech, Rocky Hill, N.J.) was included as a positive control. 30 ul of titrated variants were then transferred to simulated CD8+ T cells as above.

[0433] IFNγ Quantification: IFNγ was quantified using MSD (Mesoscale Discovery, Piscataway, N.J.). The night before cytokine quantification, MSD plates were blocked and coated in capture antibodies according to the manufacturers' instructions. The following day, plates were washed in PBS-T and 5 ul of assay diluent was added to each plate. The supplied IFNγ standard was titrated from 1000 ng/mL down to 1 pg/mL. Supernatants were thawed at room temperature and 5 uL of samples or standards were transferred to MSD plates. Detection antibodies were prepared at appropriate dilutions and 10 uL was added to each sample and standard well in MSD plates. The plates were sealed with aluminum foil and incubated away from light at room temperature for two hours. Plates were washed 3× in PBS-T and 40 uL MSD Gold read buffer T was added to each well. Plates were read on the MESO SECTOR 6000 and cytokine concentration was determined using MSD software. Data from a standard curve and samples were used to perform a nonlinear curve-fit with x-interpolation to obtain IFNγ concentrations in pg/mL. Four independent experiments were conducted and data from each was analyzed in a nonlinear mixed effect model to generate curve fit and 95% confidence intervals.

[0434] Results

[0435] CD8+ T cell IFNγ release after incubation in the presence of the non-masked IL12 HetFc fusion variant v30806 (equivalent to parental v22951 but with the N-terminal Arg of p35 removed) and masked variants derived from v22951 treated+/−matriptase are summarized in FIGS. 18A-18F and Tables 10 and BB.

[0436] Across four independent experiments, antibody and receptor masked variants induced significantly less IFNγ release compared to non-masked IL12 HetFc variant v30806. The potencies of antibody masked variant v31277 and receptor masked variant v32045 were reduced 69-fold (p=0.00051) and 41-fold (p<10⁻⁶) compared to v30806, respectively (FIGS. 18A and 18D). Pre-treatment of masked variants with matriptase resulted in recovery of IFNγ release by 35-fold for variant v31277 (p<10⁻⁶) and 21-fold (p<10⁻⁶) for variant v32045 (FIGS. 18B and 18E). Matriptase treated antibody and receptor masked variant potencies were not significantly different than matriptase treated parental variants (FIGS. 18C and 18F). v32862, which is derived from v31277 but with an alternate non-cleavable linker between the Briakinumab scFv VH and VL domains, displayed a 52-fold reduction in potency compared to non-masked v30806 (FIG. 18G).

TABLE BB
Fold potency reduction and IL12 activity recovery- IFNγ
production by CD8T Cells

| | | | | | | Var. +M | |
|---|---|---|---|---|---|---|---|
| | | | | | | EC50/Parental | |
| | | | | | Variant | Var. +M EC50 | |
| | | | | | EC50/Parental | Fold Change in | |
| | | | | | Variant EC50 | IL12 activity | |
| | | | | Heparin | Fold Change in | recovery post | |
| | Unmasked | Mask | Cleavage Site | Binding | Potency compared | cleavage vs | |
| Variant | Parental | Type | Location | Mutation | to Parental Variant | Parental Var | FIG. |
| 31277 | 30806 | ScFv | HetFc—/—Mask, Mask | | 69 | 1 | 18A-C |
| | | | (VH—/—VL) | | | | |
| 32045 | 30806 | Receptor | HetFc—/—Mask | | 41 | 1 | 18D-F |

### Example 13: In Vivo Activity of Parental IL12 Fusion Proteins

[0437] Recombinant IL12 is severely toxic in humans and mice when administered systemically. We developed an in vivo model to assess tolerability of IL12 HetFc fusion proteins utilizing severely immunocompromised NOG mice engrafted with human PBMCs.

[0438] Methods:

[0439] Two cohorts of 4-5 week old NOG mice were injected intravenously with 1×10⁷ human PBMCs (thawed from frozen) from two donors. One day post engraftment, mice were administered parental, non-masked IL12 HetFc fusion variants v30806 and v30818 intraperitoneally at 1 or 5 mg/kg. A second dose of variant was administered on day 8. Body weight and clinical health signs were monitored daily. Mice were euthanized when they reached >20% body weight loss and/or exhibited irreversible worsening of clinical health score. Select mice were bled on days 1, 3, 7 and 9 post initial dose. Serum was isolated from blood collected at all time points and frozen at −80° C. for subsequent pharmacokinetic analysis of variants. Presence of IL12 HetFc variants was assessed using an anti-IL12 p35 antibody capture and anti-human Fc gamma HRP detection sandwich ELISA. Results were analyzed using Graph Pad Prism. Results from survival were analyzed using Graph Pad Prism.

[0440] Results:

[0441] The effects of parental, non-masked IL12 HetFc variants on the survival of mice engrafted with human PBMCs is shown in FIGS. 19A-19D. In both cohorts, a significant decrease in survival was observed within 2 days (experimental day 11) after the second administration of either v30806 or v30818 IL12 HetFc fusions (FIGS. 19A-19D). No difference in survival was observed between mice treated with 1 vs. 5 mg/kg of either variant. No difference in survival was observed between parental non-masked variant v30806, or its counterpart that contains a mutated heparin binding loop, variant v30818, at either dose in either cohort (FIG. 19A vs. FIG. 19B and FIG. 19C vs. FIG. 19D). PK analysis showed that serum levels of v30806 and v30818 were similar at all time points at both the 5 and 1 mg/kg dose, suggesting that mutation of the heparin binding loop did not affect PK as expected (FIG. 20). Overall serum exposure remained high until 3 days, suggesting terminal clearance of IL12 HetFc fusions is slow, which is also unexpected based on serum exposure of other IL12 fusion proteins in the literature. These results indicate that parental, non-masked IL12 HetFc variants have a normal serum exposure and are not tolerated in immunocompromised mice engrafted with human PBMCs at doses above 1 mg/kg. They suggest that masking variants may increase tolerability of IL12 HetFc fusions.

### Example 14: In Vivo Activity of Masked IL12 Fusion Proteins

[0442] IFNγ is a key mediator of IL12 dependent toxicity in humans and mice. As masked IL12 HetFc fusion proteins induce significantly less IFNγ production in vitro, they should induce less serum IFNγ in mice, resulting in less toxicity.

[0443] Methods: Three cohorts of 4-5 week old NOG mice are injected intravenously with 1×10⁷ human PBMCs (thawed from frozen) from three donors. One day post engraftment, mice are administered parental, non-masked IL12 HetFc or masked IL12 HetFc variants intraperitoneally at doses ranging from 0.0039-1 mg/kg. A second dose of variant is administered on day 8. Body weight and clinical health signs are monitored daily. Select mice are bled on days 1, 3, 7 and 9 post initial dose. Blood is collected at experimental endpoint from all mice. Serum is isolated from blood collected at all time points and frozen at −80° C. for subsequent cytokine and pharmacokinetic analysis of variants.

[0444] Results: It is expected that in human PBMC engrafted NOG mice, administration of parental, non-masked IL12 HetFc variants will cause significant loss in body weight and/or deterioration in clinical health signs, as well as increases in serum IFNγ after 1 or 2 administrations of variant. These measures of tolerability are expected to decrease in severity in a dose dependent manner. It is expected that the maximum tolerated dose of masked IL12 HetFc variants will be significantly greater than parental non-masked variants.

### Example 15: Design, Production, and Testing of Double-Masked IL12 HetFc Fusion Proteins

[0445] To reduce the IL12 activity of masked IL12 HetFc fusion proteins beyond that achieved with a single masking moiety, multiple masking moieties are incorporated.

### Methods:

[0446] To design double-masked IL12 HetFc fusions, two compatible masking moieties (i.e. two non-competing IL12 binding proteins) are fused to one or more available termini of parental non-masked IL12 HetFc fusions via peptide linkers, where either the peptide linker(s) between the IL12 HetFc fusion and the mask(s) and/or between the IL12 HetFc fusion and the IL12 are protease-cleavable. Examples of double-masked variants using a Briakinumab scFv mask in combination with an scFv mask derived from the antibody h6F6 (ref: U.S. Pat. No. 8,563,697 B2), or using a portion of the IL12Rβ1 ECD in combination with a portion of the IL12Rβ2 ECD are listed in Table 15 and diagrammed in FIG. 21.

[0447] Proteins are produced and characterized biophysically as described in Example 7, cleaved by matriptase as described in Example 8, and tested for NK or CD8+ T cell activity to assess the reduction in potency of the masked molecules and their recovery of potency post-cleavage as described in Example 9 and Example 12.

TABLE 15
Example double-masked IL12 HetFc fusion proteins

| Variant ID | HetFc 1 clone ID | HetFc 2 clone ID | Other clone ID |
|---|---|---|---|
| v32867 | CL_#22735 | CL_#24228 | |
| v32868 | CL_#24229 | CL_#22279 | |
| v32869 | CL_#24230 | CL_#22279 | |
| v32870 | CL_#24232 | CL_#24231 | |
| v32871 | CL_#24233 | CL_#22279 | |
| v32873 | CL_#24235 | CL_#24236 | CL_#17871 |
| v32895 | CL_#24232 | CL_#24246 | CL_#17871 |
| v35456^{a} | CL_#24224 | CL_#24228 | |
| v35457^{b} | CL_#26503 | CL_#26320 | |

^{a}derived from v32867 but with an alternate non-cleavable linker between the Briakinumab scFv VH and VL domains.
^{b}derived from v35456 but with alternate non-cleavable linkers between the HetFc and Briakinumab scFv VH domains and between the p35 domain and the h6F6 scFv VL domains

### Results:

[0448] Following Protein-A purification, only the double-masked variant v32867 was recovered with comparable yield to non-masked or single-masked control variants v30806 and 31277, with yields of 55, 62, and 45 mg/L, respectively, while other double-masked variants had yields of less than 10 mg/L (excluding v35456 and v35457, which were not expressed in this group). UPLC-SEC analysis of PA-purified v32867 revealed 22.4% high molecular weight species, 25.3% correct heterodimeric species, and 52.3% excess single-chain and homodimeric species. In this case, the large amount of excess single-chain and homodimeric species was caused by a non-optimized DNA ratio being used for scale-up. Nevertheless, the desired heterodimeric species was purified subsequently to 94.6% homogeneity by SEC.

[0449] CD8+ T cell IFNγ release after incubation in the presence of the double-masked variant v32867 is shown in FIGS. 27A-27B. Across 3 experiments, v32867 displayed a 14,967-fold reduced potency compared to the corresponding non-masked variant v30806 and a 17,158-fold increased potency after treatment with matriptase (FIG. 27A). v35456, which is derived from v32867 but with an alternate non-cleavable linker between the Briakinumab scFv VH and VL domains, displayed a 25,288-fold reduction in potency compared to non-masked v30806 (FIG. 27B).

### Example 16: MSGRSANA uPa/Matriptase Protease Cleavage Site Tested in Alternative Masked Fusion Protein Format

[0450] The cleavage site within v22804 (MSGRSANA; SEQ ID NO:10) was identified as described in Example 2 as a suitable lead cleavage sequence that has high specific cleavage activity for uPA and matriptase, while being resistant to other serine protease such as plasmin. This sequence was used in numerous masked IL12 fusion proteins as described in the Examples above. This example describes the design and construction of a masked anti-CD3 X anti-Her2 T cell engager fusion protein comprising the MSGRSANA protease cleavage site.

[0451] An anti-CD3 Fab x anti-Her2 scFv Fc was appended with a mask on the anti-CD3 Fab by linking one of the ligand-receptor pair PD-1-PDL-1 to the N-terminus of the light chain of the Fab and the other to the N-terminus of the heavy chain. The fusion protein constructs were designed as follows.

[0452] Methods

[0453] The fusion proteins were in a modified bispecific Fab×scFv Fc format with a half-antibody comprising the anti-CD3 heavy and light chain that forms a heterodimer with an anti-Her2 scFv fused to an Fc. The anti-CD3 paratope was described in US20150232557A1 (VL SEQ ID NO: 271; VH SEQ ID NO: 272 (SEQS 1 and 2)). The anti-Her2 paratope was in an scFv format that is based on trastuzumab VL and VH (Carter, P. et al. Humanization of an anti-p185HER2 antibody for human cancer therapy. Proc Natl Acad Sci USA 89, 4285-4289, doi:10.1073/pnas.89.10.4285 (1992)) connected by a glycine serine linker as described in U.S. Ser. No. 10/000,576B1 (SEQ ID NO:273). To allow for selective heterodimeric pairing, mutations were introduced in the anti-CD3 CH3 as well as the anti-Her2 scFv-Fc CH3 chain as described previously (Von Kreudenstein, T. S. et al. Improving biophysical properties of a bispecific antibody scaffold to aid developability: quality by molecular design. MAbs 5, 646-654, doi:10.4161/mabs.25632 (2013); (A chain CH3 domain, SEQ ID NO:274, B chain CH3 domain SEQ ID NO: 275). Mutations (L234A_L235A_D265S as compared to a wild type human IgG1 CH2) were also introduced in both CH2 domains to reduce binding to the Fc gamma receptors (SEQ ID NO: 276). Furthermore, polypeptides based on the modified protein sequences of the IgV domains of human PD-1 (SEQ ID NO: 277) and/or PD-L1 (SEQ ID NO: 278) (West, S. M. & Deng, X. A. Considering B7-CD28 as a family through sequence and structure. Exp Biol Med (Maywood), 1535370219855970, doi:10.1177/1535370219855970 (2019) were fused to the N-termini of heavy chain (VH-CH1-hinge-CH2-CH3) and kappa light chain (VL-CL) of the anti-CD3 variable domains, respectively, using linkers that were comprised of a variable number of repeats of sequences predicted to form helical turns ((EAAAK)ₙ, Chen, X., Zaro, J. L. & Shen, W. C. Fusion protein linkers: property, design and functionality. Adv Drug Deliv Rev 65, 1357-1369, doi:10.1016/j.addr.2012.09.039 (2013)). These PD-1 and PD-L1 moieties were predicted to dimerize and sterically block epitope binding. In all variants, either the PD-1 or the PD-L1 sequence used as one half of the mask contained mutations to increase the affinity of the PD-1:PD-L1 complex as described before (Maute, R. L. et al. Engineering high-affinity PD-1 variants for optimized immunotherapy and immuno-PET imaging. Proc Natl Acad Sci USA 112, E6506-6514, doi:10.1073/pnas.1519623112 (2015); SEQ ID NO: 279; Liang, Z. et al. High-affinity human PD-L1 variants attenuate the suppression of T cell activation. Oncotarget 8, 88360-88375, doi:10.18632/oncotarget.21729 (2017); SEQ ID NO:344. Additionally, in all WT PD-1 moieties, an unpaired cysteine was mutated to serine to remove the liability of an exposed reducing group (SEQ ID NO: 345). Some variants also contained a cleavage sequence for the tumor microenvironment (TME)-associated protease uPa (MSGRSANA SEQ ID NO: 10), to allow for the removal of part or all of the mask by exposure of the fusion protein to protease. A schematic of the construct design for a masked Fab as well as the intended mechanism of action is shown in Table 16. The final designs were bispecific Fab×scFv Fc molecules that contain a masked anti-CD3 Fab as well as an anti-Her2 scFv. A schematic is shown in Table 16 and the clones used are listed below in Table 16. Sequences are provided in Table 24.

TABLE 16
Sequence composition of tested variants
Schematics are shown in FIG. 33

| Variant | | Clone | Clone | Clone |
|---|---|---|---|---|
| No | Description | H1 | L1 | H2 |
| 30421 | CD3 × Her2 Fab × scFv Fc without mask | 12989 | 12985 | 21490 |
| 30423 | HA PD-1: WT PD-L1 masked CD3 × Her2 Fab × | 22080 | 22091 | 21490 |
| | scFv Fc, with an uncleavable linker | | | |
| 30426 | WT PD-1: HA PD-L1 masked CD3 × Her2 Fab × | 22082 | 22092 | 21490 |
| | scFv Fc, with an uncleavable linker | | | |
| 30430 | HA PD-1: WT PD-L1 masked CD3 × Her2 Fab × | 22080 | 22096 | 21490 |
| | scFv Fc, PD-L1 with a cleavable linker | | | |
| 30436 | WT PD-1: HA PD-L1 masked CD3 × Her2 Fab × | 22086 | 22092 | 21490 |
| | scFv Fc, PD-1 cleavable | | | |
| 31934 | WT PD-1: WT PD-L1 masked CD3 × Her2 Fab × | 22083 | 22094 | 21490 |
| | scFv Fc, PD-1 and PD-L1 cleavable | | | |
| 31929 | Half-masked CD3 × Her2 Fab × scFv Fc, HA PD- | 22080 | 12985 | 21490 |
| | 1 attached to HC | | | |
| 31931 | Half-masked CD3 × Her2 Fab × scFv Fc, HA PD- | 12989 | 22092 | 21490 |
| | L1 attached to LC | | | |

[0454] Sequences of modified CD3×Her2 Fab×scFv variants were then ported into expression vectors and expressed and purified largely as described in Protocols 1, 2 and 6

[0455] Samples contained significant amounts of higher molecular weight species as determined by UPLC-SEC after protein A purification (not shown) and preparative SEC was used in order to obtain samples of high purity. Yields after preparative SEC ranged from 1.5-5 mg per variant. Sample purity and stability was assessed largely as described in Protocols

### Purity and Homogeneity Assessment of Masked Anti-CD3 Variants

[0456] Purified variants were assessed for purity and sample homogeneity by non-reducing/reducing Caliper UPLC-SEC as described below.

[0457] Methods

[0458] Following purification, purity of samples was assessed by non-reducing and reducing High Throughput Protein Express assay using Caliper LabChip® GXII (Perkin Elmer, Waltham, Mass.). Procedures were carried out according to HT Protein Express LabChip® User Guide version 2 with the following modifications. mAb samples, at either 2 ul or 5 ul (concentration range 5-2000 ng/ul), were added to separate wells in 96 well plates (BioRad, Hercules, Calif.) along with 7 ul of HT Protein Express Sample Buffer (Perkin Elmer #760328). The reducing buffer is prepared by adding 3.5 μL of DTT(1M) to 100 μL of HT Protein Express Sample Buffer. mAb samples were then denatured at 90° C. for 5 mins and 35 μl of water is added to each sample well. The LabChip® instrument was operated using the HT Protein Express Chip (Perkin Elmer #760499) and the HT Protein Express 200 assay setting (14 kDa-200 kDa).

[0459] UPLC-SEC was performed on an Agilent Technologies 1260 Infinity LC system using an Agilent Technologies AdvanceBio SEC 300A column at 25° C. Before injection, samples were centrifuged at 10000 g for 5 minutes, and 5 mL was injected into the column. Samples were run for 7 min at a flow rate of 1 mL/min in PBS, pH 7.4 and elution was monitored by UV absorbance at 190-400 nm. Chromatograms were extracted at 280 nm. Peak integration was performed using the OpenLAB CDS ChemStation software.

[0460] Results

[0461] UPLC-SEC traces of samples after preparative SEC purification of the variants 30421, 30423, 30430, and 30436 showed highly homogeneous samples that contained 89%-94% of correct species. The presence of a small peak at a low retention time compared to the main species indicated the presence of small amounts of high molecular weight species such as oligomers and aggregates in all samples.

[0462] Analysis of non-reducing Caliper showed a single predominant species and only bands corresponding to the intact chains of all variants were found in the reducing Caliper run. Notably, the masked heavy and light chains showed a significantly higher apparent molecular weight than what would be expected (110 kDa vs 63 kDa for the HC, 54 kDa vs 37 kDa for the LC). This was also reflected in the high apparent molecular weight of the non-reduced, disulfide bonded species (215 kDa vs 152 kDa). Glycosylation of both the PD1 and PD-L1 moieties in the designs is likely causing the increase in apparent molecular weight (Tan, S. et al. An unexpected N-terminal loop in PD-1 dominates binding by nivolumab. Nat Commun 8, 14369, doi:10.1038/ncomms14369 (2017), Li, C. W. et al. Glycosylation and stabilization of programmed death ligand-1 suppresses T-cell activity. Nat Commun 7, 12632, doi:10.1038/ncomms12632 (2016)).

### Stability Assessment of Masked Anti-CD3 Variants

[0463] Purified variants were assessed for thermal stability by differential scanning calorimetry (DSC) largely as described Protocol 11.

[0464] Results

[0465] The DSC thermogram of the unmodified CD3×Her2 Fab×scFv Fc variant (30421) showed transitions at 68 and 83° C. While the transition with a Tₘ of 68° C. likely corresponds to unresolved individual transitions for unfolding of the anti-CD3 Fab, anti-Her2 scFv and CH2 domain, the transition at Tₘ=83° C. likely corresponds to unfolding of the CH3 domain in the heavy chain. Thermograms of variants bearing a PD-1:PD-L1 mask (30430, 30436) also showed two transitions at similar temperatures and with similar thermogram traces to the unmasked variant. This indicates that the fused masking domains do not affect the Tₘ of the anti-CD3 Fab, and either unfold cooperatively with the Fab or uncooperatively but with a similar Tₘ to Fab, scFv and CH2.

### uPa Cleavage of Anti-CD3 Variants

[0466] In order to assess release of part of or all of the mask from the anti-CD3 Fab of the fusion proteins by cleavage of the introduced protease cleavage sites in the linkers, samples were treated with uPa in vitro. Reactions were monitored by reducing Caliper as follows.

[0467] Methods

[0468] For a preparative cleavage of the variants, 25-100 ug of purified sample was diluted to a final variant concentration of 0.2 mg/mL in PBS+0.05% Tween20 and Recombinant Human u-Plasminogen Activator (uPa)/Urokinase (R&D Systems #P00749) was added at a 1:50 protease: substrate ratio. After incubation at 37° C. for 24 h, sample fragments were analyzed in reducing Caliper and then frozen and stored at −80° C. until further use.

[0469] Results

[0470] Analysis of reducing Caliper profiles of the masked variants before and after uPa treatment revealed that under the investigated conditions, part or all of the mask was removed from the Fab effectively by cleavage at the introduced cleavage sites (FIG. 24). For successfully cleaved variants (30430, 30436, 31934), bands representing fragments of masked heavy and/or light chain disappeared completely upon cleavage while fragments of un-masked heavy and/or light chain appear. While a broad band of low intensity corresponding to a fragment of free PD-1 can be observed for variant 30430, this was not the case for the released PD-L1 in variant 30436. Small size and size heterogeneity due to glycosylation (Tan, S. et al. An unexpected N-terminal loop in PD-1 dominates binding by nivolumab. Nat Commun 8, 14369, doi:10.1038/ncomms14369 (2017), Li, C. W. et al. Glycosylation and stabilization of programmed death ligand-1 suppresses T-cell activity. Nat Commun 7, 12632, doi:10.1038/ncomms12632 (2016)) likely rendered the free PD-1 and PD-L1 fragments barely detectable and undetectable, respectively. In variants that do not contain the cleavage sequence (30421, 30423), no cleavage was observed.

### Masking/Unmasking of CD3-Binding

[0471] Uncleaved and cleaved samples of anti-CD3 variants were tested for binding to CD3 expressing Jurkat cells by ELISA as follows.

[0472] Methods

[0473] Human Jurkat cells (Fujisaki Cell Center, Japan) were maintained in RPMI-1640 medium supplemented with 2 mM L-glutamine and 10% of heat-inactivated fetal bovine serum (FBS) with 1× Penicillin/Streptomycin, in a humidified+5% CO2 incubator at 37° C.

[0474] Samples of modified CD3×Her2 variants were diluted 2× in blocking buffer, followed by seven three-fold serial dilutions in blocking buffer for a total of eight concentration points. Blocking buffer alone was added to control wells to measure background signal on cells (negative/blank control).

[0475] All incubations were performed at 4° C. On the day of the assay, exponentially growing cells were centrifuged and seeded in a 96-well filter plate (MilliporeSigma, Burlington, Mass., USA) in a 1:1 mixture of complete culture medium and blocking buffer. Equal volumes of 2×variants or controls were added to cells and incubated for 1 hour. The plate was then washed 4 times using vacuum filtration. An HRP-conjugated anti-human IgG Fc gamma specific secondary antibody (Jackson ImmunoResearch, West Grove, Pa., USA) was added to the wells and further incubated for 1 h. Plates were washed 7 times by vacuum filtration followed by the addition of TMB substrate (Thermo Scientific, Waltham Mass., USA) at room temperature. The reaction was stopped by adding 0.5 volume of 1 M sulfuric acid and the supernatant was transferred by filtration into a clear 96-well plate (Corning, Corning, N.Y., USA). Absorbance at 450 nm was read on a Spectramax 340PC plate reader with path-check correction.

[0476] Binding curves of blank-subtracted OD450 versus linear or log antibody concentration were fitted with GraphPad Prism 8 (GraphPad Software, La Jolla, Calif., USA). A one-site specific, four-parameter nonlinear regression curve fitting model with Hill slope was employed in order to determine Bmax and apparent Kd values for each test article.

[0477] Results

[0478] As can be seen in FIG. 25, variants containing a full PD1:PD-L1 based mask appended to the CD3 Fab (30423, 30430, 30436) showed 40-180 fold reduced binding compared to the unmasked control (30421). Upon treatment with uPa, CD3 binding of the cleavable variants 30430 and 30436 was partially restored (within 6-7 fold of the unmasked control). This partial recovery might be caused by a steric hinderance of epitope binding by the portion of the mask that is left on the mask after cleavage. Concomitantly, controls that only had PD-1 or PD-L1 appended to either heavy or light chain, respectively (31929, 31931), showed a similar reduction (4-5 fold) in binding compared to the unmasked control as the uPa-cleaved samples of the fully masked variants.

### T-Cell Dependent Cellular Cytotoxicity of Masked and Unmasked Variants

[0479] The functional impact of the PD-1:PD-L1 based mask on the ability of the CD3×Her2 Fab×scFv Fc variants to engage and activate T-cells for the killing of Her2-bearing cells was assessed in a T-cell dependent cellular cytotoxicity (TDCC) assay as follows.

[0480] Methods

[0481] Coculture Assay

[0482] JIMT-1 (Leibniz Institute, Braunschweig, Germany), that are Her2 positive and express ˜500 000 receptors per cell, were thawed and cultured in growth medium prior to experiment set-ups. The growth medium consisted of McCoy's 5A and DMEM medium (A1049101, ATCC modification) (Thermo Fisher Scientific, Waltham, Mass.) supplemented with 10% Fetal Bovine Serum (Thermo Fisher Scientific, Waltham, Mass.) respectively. The cells were maintained horizontally in T-75 flasks (VWR, Radnor, Pa.) in an incubator at 37° C. with 5% carbon dioxide. On the day of the experiment, the variants were titrated in triplicate at 1:3 dilution directly in a 384-well cell culture treated optical bottom plates (ThermoFisher Scientific, Waltham, Mass.) from 5 nM to 0.08 pM. JIMT-1 cells were harvested using TrypLE (ThermoFisher Scientific, Waltham, Mass.) washed in media, and counted. A vial of primary human pan-T cells (BioIVT, Westbury, N.Y.), was thawed in a 37° C. water bath, washed in media, and counted. Pan T cell suspension was mixed with JIMT-1 cells at 5:1 effector to target ratio, washed and resuspended at 0.55E6 cell/ml. 20 uL of the mixed cell suspension was added to the plate containing the titrated variants.

[0483] The plates were incubated for 48 hr in an incubator at 37° C. with 5% carbon dioxide. The samples were then subjected to a high-content cytotoxicity assessment.

[0484] High Content Cytotoxicity Analysis

[0485] For visualization of nuclei and assessment of viability, cells were stained with Hoechst33342. 10 uL of Hoechst33342 was diluted 1:1000 in media, added to the cells after the 48 h period and incubated for a further 1 hr at 37° C. Then, the plate was subjected to high content image analysis on CellInsight CX-5 (ThermoFisher Scientific, Waltham, Mass.) in order to distinguish and quantify viable and dead tumor cells as well as effector cells. The plate was scanned on the CellInsight CX5 high content instrument using the SpotAnalysis.V4 Bioapplication with the following settings: Objective: 10×, Channel 1— 386 nm: Hoechst (Fixed exposure time 0.008 ms with a Gain of 2).

[0486] Results

[0487] The masking effects seen above for the CD3×Her2 Fab×scFv Fc variants in binding to CD3 were recapitulated when the same samples were interrogated for function in a TDCC assay with Her2 expressing JIMT-1 cells (FIG. 26). While the unmasked variant (30421) showed robust tumor cell killing at low variant concentrations, the potency of a masked, uncleavable variant (30423) was decreased by 1000×. A fully masked variant with a cleavable PD-L1 moiety on the light chain (30430) was also reduced in potency before uPa treatment, by ˜100×. This discrepancy in masking between uncleavable and cleavable variants was seen above for CD3 binding as well and is likely due to the increased flexibility in one of the linkers introduced by the uPa cleavage site which added 8 amino acids to the length of the linker. After cleavage of the mask by uPa, the potency of 30430 returned to that of an unmasked (30421) variant. A control variant with only the PD-1 moiety of the mask attached (31929) showed similar potency to 30421 and uPa-treated 30430. An irrelevant anti Respiratory Syncytial Virus (RSV) antibody (22277) showed no activation of T cells for tumor cell killing.

[0488] The above experiments further confirm that the MSGRSANA (SEQ ID NO:10) uPa cleavage site can be transferred into a variety of recombinant proteins of different formats, having different masks and be effectively cleaved to unmask a desired protein.

### Example 17: Testing the Effect of Scfv Mask VH-VL Linker Cleavage on IL12 Binding

[0489] As described in Example 5, some scFv-masked IL12 HetFc Fusion Proteins were designed with an additional protease cleavage sequence within the linker between the VH and VL domains of the scFv mask, which was hypothesized to aid in recovery of IL12 activity by destabilizing the scFv upon protease cleavage and accelerating its release. To test this hypothesis, Fc-scFv fusions were produced with or without a protease cleavage sequence between the scFv VH and VL, digested with Matriptase, and tested for IL12 binding by SPR.

### Methods

[0490] Fc-scFv fusions were designed in the same format as masked IL12 HetFc fusion proteins but without IL12 moieties, i.e. as HetFc heterodimers with a scFv linked to the C-terminus of one HetFc chain through a protease-cleavable linker, where the scFv optionally contains a second protease cleavage sequence within the linker between the VH and VL. Variants are listed in Table 17. Variants were produced as described in Example 7, digested with Matriptase as described in Example 8, and tested for IL12 binding by SPR as described in Example 3.

TABLE 17
Briakinumab HetFc-scFv fusion variants

| Variant ID | HetFc 1 clone ID | HetFc 2 clone ID |
|---|---|---|
| v32909 (cleavable VH-VL linker) | CL_#22735 | CL_#12155 |
| v32910 (non-cleavable VH-VL | CL_#23571 | CL_#12155 |
| linker) | | |

### Results:

[0491] Both variants displayed IL12 binding kinetics similar to those determined in Example 3 for Briakinumab Fab and scFv controls, both with and without cleavage by Matriptase, indicating that cleavage of neither the Fc-scFv linker nor the VH-VL linker is detrimental to IL12 binding (Table 18; note that ka are near instrument detection limit).

TABLE 18
SPR binding to immobilized IL12.

| | Kinetics pre-digest | | | Kinetics post-digest | | |
|---|---|---|---|---|---|---|
| Variant ID | ka (1/Ms) | kd (1/s) | KD (M) | ka (1/Ms) | kd (1/s) | KD (M) |
| v32909 | 2.25E+06 | 4.48E−05 | 1.98E−11 | 4.19E+07 | 6.48E−05 | 1.47E−12 |
| v32910 | 2.10E+06 | 4.09E−05 | 1.94E−11 | 8.65E+06 | 4.68E−05 | 5.37E−12 |

### Example 18: Design, Production, and Testing of Reduced-Potency IL12 HetFc Fusion Proteins

[0492] To reduce the IL12 activity of masked and non-masked IL12 HetFc fusion proteins for better overall tolerability, mutations were made to the IL12 p35 or p40 domains to reduce binding to the receptors IL12Rβ1 and IL12Rβ2.

### Methods:

[0493] To design IL12 HetFc fusion proteins with reduced binding to IL12Rβ1 and IL12Rβ2, amino acids within the p35 and p40 domains of IL12 that contribute to IL12 stability or that potentially interact directly with IL12Rβ1 and IL12Rβ2 were identified based on analyses considering structural contacts between p35 and p40, sequence conservation among IL12 orthologues, expected structural homology of IL12-IL12Rβ2 with the IL23-IL23R complex (pdb 5mzv), epitope comparisons of known IL12Rβ1 and/or IL12Rβ2 blocking antibodies (e.g. Briakinumab, pdb 5njd; Ustekinumab, pdb 3hmx; antibodies 22E11, 124C4, and 37D5, pdb 5mzv), and regions of excess surface charge. The identified amino acids or groups thereof were then mutated to alter their size, polarity, and/or charge. Non-masked and masked IL12 HetFc fusion proteins with the selected mutation(s) were constructed as described in examples 1 and 5. Mutations made to IL12 and corresponding clone and variant IDs for IL12 HetFc fusion proteins are listed in Table 19.

[0494] Proteins were produced and characterized biophysically as described in Example 7 and tested for CD8+ T cell activity to assess the reduction in potency of the non-masked and masked molecules with mutated IL12 domains relative to corresponding controls with wild-type IL12 as described in Example 12.

TABLE 19
IL12 p35 and p40 mutations designed to reduce IL12 activity,
and corresponding masked and non-masked reduced-potency
IL12 HetFc fusion protein clone and variant IDs.

| | | | | Non-masked |
|---|---|---|---|---|
| | | | Masked | reduced- |
| | | | reduced-potency | potency |
| | | | IL12 HetFc | IL12 HetFc |
| p35 | p40 | HetFc1 | fusion protein | fusion protein |
| mutations | mutations | clone ID^{a} | Variant ID^{b} | Variant ID^{c} |
| | S175V | CL_#24831 | 33501 | 33489 |
| | A179T | | | |
| | S183T | | | |
| | S294N | | | |
| L68A | | CL_#24832 | 33502 | 33490 |
| R181A | | CL_#24833 | 33503 | 33491 |
| V185A | | CL_#24834 | 33504 | 33492 |
| E38R | | CL_#24835 | 33505 | 33493 |
| K128E | | | | |
| K168E | | | | |
| P41S | | CL_#24836 | 33506 | 33494 |
| I171Q | | | | |
| I175S | | | | |
| F39S | | CL_#24837 | 33507 | 33495 |
| Y40S | | | 35425^{d} | |
| Y167S | | | 35427^{d} | |
| | | | 35437^{f} | |
| T43A | | CL_#24838 | 33508 | 33496 |
| E45R | | | | |
| I47S | | | | |
| D48R | | | | |
| T43A | | CL_#24839 | 33509 | 33497 |
| E45R | | | | |
| E46K | | | | |
| I47S | | | | |
| D48R | | | | |
| E50K | | | | |
| | D41S | CL_#24840 | 33510 | 33498 |
| | E45R | | 36190^{e} | |
| | K58S | | 36193^{f} | |
| | E59S | | | |
| | K195D | | | |
| | K99S | CL_#24841 | 33511 | 33499 |
| | E100S | | | |
| | R159S | | | |
| | E187S | CL_#24842 | 33512 | 33500 |
| | T202S | | | |
| | S204R | | | |

^{a}HetFc2 clone ID is CL_# 12153 for all Non-masked IL12 HetFc variants and CL_#22735 for all Masked IL12 HetFc variants unless noted otherwise
^{b}All Masked IL12 HetFc fusion protein variants are derived from v31277 with the addition of the specified p35 or p40 mutations unless noted otherwise
^{c}All Non-masked IL12 HetFc fusion protein variants are derived from v30806 with the addition of the specified p35 or p40 mutations
^{d}Variants 35425 and 35427 are derived from variants 32862 and 35426, respectively, where variant 35425 uses HetFc2 clone CL_#24224 (similar to CL_#22735 but lacking the second protease cleavage sequence within the scFv VH-VL linker) and variant 35427 uses HetFc2 clone CL_#26498 (same as CL_#24224 but with the scFv H_F27V mutation)
^{e}Variant 36190 is dervied from variant 32862, using HetFc2 clone CL_#24224 (similar to CL_#22735 but lacking the second protease cleavage sequence within the scFv VH-VL linker)
^{f}Variants 35437 and 36193 are derived from variants 35425 and 36190, respectively, but use HetFc2 clone CL_#26503 (similar to CL_#24224 but with an alternate non-cleavable linker between the HetFc and scFv VH domains)

### Results:

[0495] Yields and UPLC-SEC monomer purity after Protein-A purification were between 43-75 mg/L and 46-73% for non-masked variants with mutated p35 or p40 domains, compared to 64 mg/L and 79% for a non-masked control variant with wild-type IL12, and were between 30-62 mg/L and 66-80% for masked variants with mutated p35 or p40 domains (excluding variants 35425, 35427, 35437, 36190, and 36193, which were not expressed in this group), compared to 47 mg/L and 76% for a masked control variant with wild-type IL12. All samples were purified to >95% monomer by Prep-SEC, except for v33500 that was to 93%. CD8+ T cell IFNγ release after incubation in the presence of the masked and non-masked IL12 HetFc fusion protein variants designed for reduced potency is summarized in

[0496] FIGS. 28A-28C and Table 20. The majority of non-masked variants showed a reduction in potency of no more than 5-fold compared to wild-type IL12 control v30806. Three variants, v33495, v33498, and v33499, showed reduction in potency as non-masked constructs, but upon masking were markedly reduced in potency from wild-type IL12 control 30806. The potencies of the non-masked variants v33495, v33498, and v33499 were 395-fold, 17-fold, and 3-fold lower than v30806, respectively, and the potencies of the corresponding masked variants v33507, v33510, and v33511 were 51996-fold, 5562-fold, and 195-fold lower than v30806, respectively. When comparing non-masked and masked variants with the same IL12 mutations, there was a 132-fold potency reduction between v33495 and v33507, 329-fold between v33498 and v33510, and 67-fold between v33499 and v33511 (FIG. 28). Compared to the 69-fold potency difference between v31277 and v30806 (corresponding masked and non-masked IL12 HetFc fusion variants with wild-type IL12; Example 12) it is evident that certain attenuated IL12 designs synergize with the scFv mask to generate even larger masking windows, which may result from differences in how well each design prevents residual binding or competition of IL12Rβ1 and/or IL12Rβ2 in the presence vs. absence of mask.

TABLE 20
Fold change in IFNγ production by CD8T Cells
when treated with reduced-potency IL12 variants

| Non-masked | Fold Change in Potency compared to parental non- |
|---|---|
| reduced-potency | masked WT IL12 variant v30806 |
| IL12 variant | (Variant EC50/Parental variant EC50) |
| 33489 | 3.6× |
| 33490 | 2.8× |
| 33491 | 3.6× |
| 33492 | 4.4× |
| 33493 | 1.0× |
| 33494 | 1.0× |
| 33495 | 395× |
| 33496 | 0.42× |
| 33497 | 0.42× |
| 33498 | 17× |
| 33499 | 3.3× |
| 33500 | 3.7× |
| Masked | Fold Change in Potency compared to parental non- |
| reduced-potency | masked WT IL12 variant v30806 |
| IL12 variant | (Variant EC50/Parental Variant EC50) |
| 33507 | 51996× |
| 33510 | 5562× |
| 33511 | 195× |
| | Fold Change in Potency compared to corresponding |
| | non-masked reduced-potency IL12 variants^{a} |
| | (Masked Variant EC50/Non-masked Variant EC50) |
| 33507 | 132× |
| 33510 | 329× |
| 33511 | 67× |

^{a}Corresponding non-masked reduced-potency IL12 variants for v33507, v33510, and v33511 are v33495, v33498, and v33499, respectively.

### Example 19: Design and Testing of Modified Linkers for Matriptase Cleavage Rate

[0497] It may be desirable to adjust the overall susceptibility to cleavage of protease-cleavable linkers within masked IL12 HetFc fusion proteins to balance cleavage rates in the tumour microenvironment with potential off-tumour cleavage. This example describes the design and testing of masked IL12 HetFc fusion proteins with shortened protease-cleavable linkers to modulate protease accessibility.

### Methods:

[0498] Masked IL12 HetFc fusion protein variants with shortened protease-cleavable linkers were designed based on variant v31277, where linker sequences on either or both sides of the protease cleavage motif were successively shortened. Variants are described in Table 21.

TABLE 21
Masked IL12 HetFc fusion protein variants
with shortened protease-cleavable linkers

| Variant ID | HetFc-mask linker sequence | HetFc1 clone ^{a} |
|---|---|---|
| v31277 | (G4S)2-MSGRSANA-(G4S)2 | CL_#22735 |
| v32857 | (G4S)2-MSGRSANA-G4S | CL_#24219 |
| v32945 | G4S-MSGRSANA-(G4S)2 | CL_#24308 |
| v32859 | G4S-MSGRSANA-G4S | CL_#24221 |
| v32860 | GGS-MSGRSANA-GGS | CL_#24222 |

^{a} All variants utilize HetFc2 clone CL_#22279

[0499] Proteins were produced and characterized biophysically as described in Example 7. Susceptibility of modified linkers within masked IL12 HetFc fusion protein variants to protease cleavage was determined by a time-course Matriptase digestion, performed as described in Example 8, with aliquots removed at various time points and assessed by reducing CE-SDS. Variants were also tested for CD8+ T cell activity as described in Example 12 to assess if shortening the HetFc-mask linker had an impact on the efficiency of masking.

### Results:

[0500] Yields and UPLC-SEC monomer purity after Protein-A purification were between 45-69 mg/L and 55-58% for masked variants with shortened HetFc-mask protease cleavable linkers, compared to 45 mg/L and 66% for parental variant v31277. All samples were purified to >97% monomer by Prep-SEC.

[0501] The time course Matriptase digest revealed that the protease-cleavable HetFc-mask linker of the parental variant v31277 was fully cleaved after 4 hours, and the time for complete cleavage increased with shortened HetFc-mask linker lengths up to 24 hours for variant v32860 (Table 22).

[0502] CD8+ T cell IFNγ release after incubation in the presence of the masked IL12 HetFc fusion protein variants designed with shortened cleavable linkers is summarized in FIG. 29. All variants had comparable potency to v31277, with the exception of v32860, which showed an approximate 2-fold reduction in potency compared to 31277 across 3 experiments.

TABLE 22
Time course Matriptase digestion of masked IL12 HetFc fusion
protein variants with modified protease-cleavable linkers

| | % cleavage at time points^{a} | | | | | | |
|---|---|---|---|---|---|---|---|
| Variant | 0 hr | 1 hr | 2 hr | 4 hr | 6 hr | 8 hr | 24 hr |
| v31277 | 0 | 62 | 84 | 100 | 100 | 100 | 100 |
| v32857 | 0 | 34 | 60 | 100 | 100 | 100 | 100 |
| v32945 | 0 | 34 | 58 | 82 | 100 | 100 | 100 |
| v32859 | 0 | 24 | 48 | 75 | 100 | 100 | 100 |
| v32860 | 0 | 18 | 38 | 61 | 73 | 79 | 100 |

^{a}% cleavage calculated by dividing the total intensity of bands corresponding to cleaved HetFc-mask species by that of non-cleaved HetFc-mask species using reducing CE-SDS

### Example 20: Indication Selection for IL-12Fc Protease-Cleavable Fusion Proteins

[0503] Increased expression of proteases has been reported in multiple cultured tumor cell lines, in vivo xenografts and human tumor tissue. It is hypothesized that tumor types with increased protease expression and or activity could be suitable indications for clinical application of IL-12Fc fusions containing protease-cleavable masks. This may be especially true in tumor types that are also highly infiltrated with immune cells expected to be stimulated by IL-12. This example describes the identification of human tumor tissues with immune cell infiltration, high protease expression and or activity, and validation of IL-12Fc fusion protein variant cleavage in human tumor material.

### Methods:

[0504] In order to identify cancer types that demonstrate high infiltration of immune cells as well as high mRNA expression of uPA or Matriptase proteases, TCGA (https://www.cancer.gov/tcga) and GTEx (Carithers, L. J. et al. A novel approach to high-quality postmortem tissue procurement: the GTEx project. Biopreserv. Biobank. 13, 311-319 (2015)) datasets were extensively investigated. First, human tumor types that have high infiltration of immune cell subsets, including macrophages, dendritic cells, NK cells and T cells were identified by CIBERSORT based on analyzing TCGA mRNA-seq data (Newman, A. M., et al. Robust enumeration of cell subsets from tissue expression profiles. Nat. Methods 12, 453-457 (2015); Thorsson, V. et al. The immune landscape of cancer. Immunity 48, 812-830 (2018)). CIBERSORT estimates the relative fraction of 22 immune cell types within a bulk tumor RNA-seq sample using a deconvolution-based approach and sets of pre-defined immune cell reference profiles. Hence, for each TCGA sample, the relative immune cell infiltration fraction was estimated by CIBERSORT (Thorsson et al, 2018) and a total immune fraction was estimated by summing up the predicted fractions for the following cell types: Dendritic Cells+NK+Macrophages (excluding M2)+Monocytes+Neutrophils+Eosinophils+CD4 T-Cells+CD8 T Cells. A median infiltration fraction for each cancer type was then computed by taking a median of infiltration fractions from all samples within that cancer type. Next, human tumor types or normal tissues that demonstrate high mRNA expression of uPA and matriptase were identified by analysis of TCGA, or GTEx mRNA sequencing data sets, respectively. The mRNA expression levels were reported as TPM values (Transcript Per Million). Median values of protease mRNA expression levels were generated for each cancer type. Cancer types with high median mRNA expression of proteases as well as high median immune cell infiltration were identified for further investigation.

[0505] To test the potential of masked IL12 HetFc fusion protein activation in predicted protease high expressing human tumors, protease-cleavable and non-cleavable masked IL12 HetFc fusion proteins were assessed by LC-MS for cleavage after incubation in human tumor tissue material. Lysates were generated from homogenized human pancreatic tumor tissue and cell supernatant removed from BxPC3 pancreatic tumor cells in monolayer cell culture. Variants were incubated in lysate or supernatant for 72 hours at 37° C., deglycosylated for 16 hours at 37° C. and purified used anti-human IgGFc followed by reduction and analysis by LC-MS.

### Results:

[0506] The analysis of median tumor immune infiltration fraction and protease mRNA expression indicated that several tumor types, including head and neck (HNSC), pancreatic (PAAD), thymic (THCA), lung (LUSC, LUAD), esophageal (ESCA), cervical (CESC), bladder (BLCA), rectal (READ) and colon (COAD) showed a high degree of both immune cell infiltration and both uPA and matriptase mRNA expression. For these tumor types, median protease expression was above median normal tissue expression (computed from GTEx). Although identified as having immune cell infiltration, chromophobe renal cell carcinoma showed above normal tissue expression of only matriptase but not uPA (FIG. 30).

[0507] After incubation of cleavable variant v31277 in human pancreatic BxPC3 tumor cell supernatant, analysis of mass by LC-MS indicated the presence of species corresponding to cleavage within the designed protease cleavage motifs in the HetFc-mask chain, compared to only intact HetFc-mask observed after incubation in PBS. Similar results were observed for variant incubated in pancreatic tumor lysate. Only intact HetFc-mask was observed for the non-cleavable variant v32041 incubated in PBS or tumor cell supernatant or lysate. These results indicate that masked IL12 HetFc fusions are susceptible to cleavage at the designed protease-cleavable linkers by proteases in human tumor tissue material.

### Example 21: Masked Non-Cleavable IL12-Fc Variants have Greater Tolerability Compared to IL12-Fc in Stem Cell Humanized Mice

### Methods:

[0508] In order to assess the ability of an engineered mask to reduce the potency of IL12-Fc in vivo, variants were tested in a humanized mouse model of toxicity. Immunodeficient NOD-scid-Gamma (NSG) mice were engrafted with human CD34+ hematopoietic stem cells to reconstitute components of a human immune system within the mouse peripheral blood and lymphoid tissues. CD34+ stem cell engraftment in immunocompromised mice provides a stable and functional humanized immune system to assess T-cell responses to IL12-Fc.

[0509] Approximately 18 weeks after CD34+ engraftment, 10 mice each were administered two injections of either a vehicle control (v33936, 0 mg/kg), an unmasked IL12-Fc variant (v30806, 1 mg/kg), or masked non-cleavable IL12-Fc variant (v32041, 1.25 mg/kg) at matched molar doses. Mice were monitored for overall health and body weight after test article administration over a period of 60 days, and peripheral blood was analyzed on Day 20 for overall human cell engraftment and cell counts of specific linage populations. Serum was isolated from peripheral blood collected at all time points and frozen at −80° C. for subsequent pharmacokinetic analysis of variants. Presence of IL12 variants was assessed using an anti-human IL12 p35 antibody capture and anti-human Fc gamma detection sandwich MSD assay.

### Results:

[0510] Humanized mice dosed with vehicle remained healthy without any loss of survival to study day 60. Mice receiving unmasked IL12-Fc experienced the highest level of toxicity with a median survival of 33 days. The masked, non-cleavable variant exhibited a delayed onset of body weight loss and increased survival compared to the unmasked variant, with a median survival of 47 days.

[0511] Peripheral blood was collected and analyzed for the presence and frequency of human CD3+ T-cells as a readout of effector response to IL12 stimulation after test article administration. A baseline peripheral blood collection prior to the first variant injection indicated an average of 53.8+/−25.6 human CD3+ T-cells/uL of blood (represented as dashed and dotted lines with shading). Mice receiving injections of the unmasked IL12-Fc variant (v30806) exhibited a significant increase in the number of circulating CD3+ T-cells compared to mice that received the vehicle control alone (v33936) on study day 20. Meanwhile, mice receiving injections of the masked, non-cleavable IL12-Fc variant did not exhibit a significant increase in circulating CD3+ cell numbers on study day 20, indicating a reduction in potency of the test article. Incorporation of a mask onto the IL12-Fc resulted in a reduced expansion of human CD3+ cells in vivo and increased survival at molar matched dose in CD34+ humanized mice.

[0512] Serum PK analysis showed that non-masked IL12-Fc (v30806, 1 mg/kg) and masked IL12-Fc (v32041, 1.25 mg/kg) at matched molar doses displayed reasonable exposure over the 13 days of serum sampling (FIG. 31). Variants were still detectable in serum at an extended timepoint of 23 days post second dose (Day 30), indicating good in-vivo stability. Masked IL12-Fc (v32041, 1.25 mg/kg) had PK comparable to the non-cell engrafted NSG mice dosed with the molar equivalent non-masked drug (non-HuNSG, v30806, 1 mg/kg). Target mediated drug disposition (TMDD) was observed at lower doses of the non-masked IL12-Fc resulting in faster clearance, attributed to the expansion of CD3+ cells. No CD34+ donor dependent effect on PK was observed.

[0513] This indicates that masking IL12-Fc potency is functionally achievable, and the correct combination of masking and attenuation could yield a systemically tolerated and activatable IL12-Fc molecule.

TABLE 23
Clone descriptions

| AA SEQ | | |
|---|---|---|
| ID NO: | Clone ID | Domain structure^{abc} |
| 20 | CL_#12153 | HetFc |
| 21 | CL_#12155 | HetFc |
| 22 | CL_#17871 | p40 |
| 23 | CL_#17872 | p35 |
| 24 | CL_#17875 | HetFc-p35 |
| 25 | CL_#17876 | HetFc-GSADGG-p40-(G4S)3-p35 |
| 26 | CL_#17877 | p35-(G4S)2-HetFc |
| 27 | CL_#17879 | p40-(G4S)2-HetFc |
| 28 | CL_#17880 | HetFc-(G4S)2-p40 |
| 29 | CL_#17881 | HetFc-p35 |
| 30 | CL_#17906 | HetFc-p19 |
| 31 | CL_#17907 | p19-(G4S)2-HetFc |
| 32 | CL_#17908 | p19 |
| 33 | CL_#17942 | HetFc-(G4S)2-p40 |
| 34 | CL_#17945 | HetFc-GSADGG-p40-(G4S)4-p19 |
| 35 | CL_#18939 | Briak_{VH}-CH1-HetFc |
| 36 | CL_#18940 | Briak_{VL}-Cλ |
| 37 | CL_#18942 | Briak_{VH}-(G4S)3-Briak_{VL}-HetFc |
| 38 | CL_#18943 | Briak_{VL}-(G4S)3-Briak_{VH}-HetFc |
| 39 | CL_#18953 | HetFc-(G4S)-LSGRSDNH-(G4S)4-IL12Rβ2₂₄₋₃₂₁ |
| 40 | CL_#18954 | IL12Rβ2₂₄₋₃₂₁-(G4S)2-LSGRSDNH-(G4S)-HetFc |
| 41 | CL_#18956 | IL12Rβ2₂₄₋₁₂₄-(G4S)2-LSGRSDNH-(G4S)-p35-(G4S)2-HetFc |
| 42 | CL_#18957 | HetFc-GSADGG-p40-(G4S)3-p35-(G4S)-LSGRSDNH-(G4S)2- |
| | | IL12Rβ2₂₄₋₁₂₄ |
| 43 | CL_#21415 | p40-(G4S)2-MSGRSANA-(G4S)3-Briak_{VL}-(G4S)3-Briak_{VH} |
| 44 | CL_#21416 | HetFc-p35-(G4S)2-MSGRSANA-(G4S)3-Briak_{VL}-(G4S)3- |
| | | Briak_{VH} |
| 45 | CL_#21417 | HetFc-(G4S)2-MSGRSANA-(G4S)2-Briak_{VL}-(G4S)3-Briak_{VH} |
| 46 | CL_#21418 | Briak_{VH}-(G4S)3-Briak_{VL}-(G4S)3-MSGRSANA-(G4S)2-p40- |
| | | (G4S)2-HetFc |
| 47 | CL_#21419 | p35-(G4S)2-MSGRSANA-(G4S)3-Briak_{VL}-(G4S)3-Briak_{VH} |
| 48 | CL_#21421 | HetFc-(G4S)2-p40-(G4S)2-MSGRSANA-(G4S)3-Briak_{VL}- |
| | | (G4S)3-Briak_{VH} |
| 49 | CL_#21423 | HetFc-GSADGG-p40-(G4S)3-p35-(G4S)3-MSGRSANA- |
| | | (G4S)4-Briak_{VL}-(G4S)3-Briak_{VH} |
| 50 | CL_#21446 | Briak_{VH}-(G4S)3-Briak_{VL}-(G4S)2-MSGRSANA-(G4S)2-p40 |
| 51 | CL_#21447 | Briak_{VH}-(G4S)3-Briak_{VL}-(G4S)4-MSGRSANA-(G4S)3-p35 |
| 52 | CL_#21451 | Briak_{VH}-(G4S)3-Briak_{VL}-(G4S)4-MSGRSANA-(G4S)3-HetFc |
| 53 | CL_#21452 | Briak_{VH}-(G4S)3-Briak_{VL}-(G4S)3-MSGRSANA-(G4S)4-p35- |
| | | (G4S)2-HetFc |
| 54 | CL_#22203 | Briak_{VH}(Y32A)-(G4S)3-Briak_{VL}-HetFc |
| 55 | CL_#22206 | Briak_{VH}(F27V)-(G4S)3-Briak_{VL}-HetFc |
| 56 | CL_#22207 | Briak_{VH}(Y52AV)-(G4S)3-Briak_{VL}-HetFc |
| 57 | CL_#22208 | Briak_{VH}(R52E)-(G4S)3-Briak_{VL}-HetFc |
| 58 | CL_#22209 | Briak_{VH}(R52E_Y52AV)-(G4S)3-Briak_{VL}-HetFc |
| 59 | CL_#22211 | Briak_{VH}(H95D)-(G4S)3-Briak_{VL}-HetFc |
| 60 | CL_#22212 | Briak_{VH}(G96T)-(G4S)3-Briak_{VL}-HetFc |
| 61 | CL_#22214 | Briak_{VH}(H98A)-(G4S)3-Briak_{VL}-HetFc |
| 62 | CL_#22279 | HetFc-GSADGG-p40-(G4S)3-p35_{ΔR} |
| 63 | CL_#22289 | HetFc-GSADGG-p40_{Hep}-(G4S)3-p35_{ΔR} |
| 64 | CL_#22290 | HetFc-GSADGG-p40_{Hep}-(G4S)3-p35_{ΔR} |
| 65 | CL_#22291 | HetFc-GSADGG-p40_{Hep}-(G4S)3-p35_{ΔR} |
| 66 | CL_#22292 | HetFc-GSADGG-p40_{Hep}-(G4S)3-p35_{ΔR} |
| 67 | CL_#22293 | HetFc-GSADGG-p40_{Hep}-(G4S)3-p35_{ΔR} |
| 68 | CL_#22294 | HetFc-GSADGG-p40_{Hep}-(G4S)3-p35_{ΔR} |
| 69 | CL_#22295 | HetFc-GSADGG-p40_{Hep}-(G4S)3-p35_{ΔR} |
| 70 | CL_#22296 | HetFc-GSADGG-p40_{Hep}-(G4S)3-p35_{ΔR} |
| 71 | CL_#22672 | HetFc-(G4S)-MSGRSANA-(G4S)4-IL12Rβ2₂₄₋₃₂₁ |
| 72 | CL_#22735 | HetFc-(G4S)2-MSGRSANA-(G4S)2-Briak_{VH}-(G4S)- |
| | | MSGRSANA-(G4S)2-Briak_{VL} |
| 73 | CL_#23360 | HetFc-(G4S)2-MSGRSANA-(G4S)2-Briak_{VL}-(G2S-(G3S)4-G)- |
| | | Briak_{VH} |
| 74 | CL_#23361 | HetFc-(G4S)2-MSGRSANA-(G4S)2-Briak_{VL}(T100C)-(G2S- |
| | | (G3S)4-G)-Briak_{VH}(G44C) |
| 75 | CL_#23363 | HetFc-(G4S)2-MSGRSANA-(G4S)2-Briak_{VH}-(G2S-G3S- |
| | | MSGRSANA-(G3S)3-G)-Briak_{VL} |
| 76 | CL_#23364 | HetFc-(G4S)2-MSGRSANA-(G4S)2-Briak_{VH} (Y32A)-(G2S- |
| | | G3S-MSGRSANA-(G3S)3-G)-Briak_{VL} |
| 77 | CL_#23512 | HetFc-(G4S)2-(G3S)2-(G4S)2-Briak_{VH}-(G4S-(G3S)2-(G4S)2)- |
| | | Briak_{VL} |
| 78 | CL_#23513 | HetFc-G4S-(G3S)2-(G4S)4-IL12Rβ2₂₄₋₃₂₁ |
| 79 | CL_#23710 | HetFc-GSADGG-MSGRSANA-GSADGG-p40-(G4S)3-p35_{ΔR} |
| 80 | CL_#23711 | HetFc-GSADGG-MSGRSANA-GSADGG-p40_{Hep}-(G4S)3- |
| | | P35_{ΔR} |
| 81 | CL_#24228 | HetFc-GSADGG-p40-(G4S)3-p35_{ΔR}-G4S-MSGRSANA- |
| | | (G4S)4-h6F6_{VL}-GGS-(G3S)4-G-h6F6_{VH} |
| 82 | CL_#24229 | HetFc-(G4S)2-MSGRSANA-(G4S)2-Briak_{VH}-G4S-Mat- |
| | | (G4S)2-Briak_{VL}-(G4S)3-MSGRSANA-(G4S)3-h6F6_{VL}-GGS- |
| | | (G3S)4-G-h6F6_{VH} |
| 83 | CL_#24230 | HetFc-(G4S)2-MSGRSANA-(G4S)2-Briak_{VH}-G4S- |
| | | MSGRSANA-(G4S)2-Briak_{VL}-(G4S)3-MSGRSANA-(G4S)3- |
| | | h6F6_{VH}-GGS-(G3S)4-G-h6F6_{VH} |
| 84 | CL_#24231 | HetFc-GSADGG-p40-(G4S)3-p35_{ΔR}-G4S-MSGRSANA- |
| | | (G4S)5-IL12Rβ2₂₄₋₃₂₁ |
| 85 | CL_#24232 | HetFc-(G4S)3-MSGRSANA-(G4S)3-IL12Rβ1₂₄₋₂₄₀ |
| 86 | CL_#24233 | HetFc-G4S-MSGRSANA-(G4S)4-IL12Rβ2₂₄₋₁₂₄-(G4S)3- |
| | | MSGRSANA-(G4S)3-IL12Rβ1₂₄₋₂₄₀ |
| 87 | CL_#24235 | IL12Rβ2₂₄₋₁₂₄-(G4S)2-MSGRSANA-G4S-p35-(G4S)2-HetFc |
| 88 | CL_#24236 | IL12Rβ1₂₄₋₂₄₀-(G4S)4-MSGRSANA-HetFc |
| 89 | CL_#24246 | HetFc-G4S-MSGRSANA-(G4S)4-IL12Rβ2₂₄₋₁₂₄-(G4S)2- |
| | | MSGRSANA-G4S-p35 |
| 302 | CL_#23571 | HetFc-(G4S)2-MSGRSANA-(G4S)2-Briak_{VH}-(G4S)-(G3S)2- |
| | | (G4S)2-Briak_{VL} |
| 303 | CL_#24219 | HetFc-(G4S)2-MSGRSANA-G4S-Briak_{VH}-(G4S)- |
| | | MSGRSANA-(G4S)2-Briak_{VL} |
| 304 | CL_#24221 | HetFc-G4S-MSGRSANA-G4S-Briak_{VH}-(G4S)-MSGRSANA- |
| | | (G4S)2-Briak_{VL} |
| 305 | CL_#24222 | HetFc-GGS-MSGRSANA-GGS-Briak_{VH}-(G4S)-MSGRSANA- |
| | | (G4S)2-Briak_{VL} |
| 306 | CL_#24224 | HetFc-(G4S)2-MSGRSANA-(G4S)2-Briak_{VH}-GGS-(G3S)4-G- |
| | | Briak_{VL} |
| 307 | CL_#24308 | HetFc-G4S-MSGRSANA-(G4S)2-Briak_{VH}-(G4S)- |
| | | MSGRSANA-(G4S)2-Briak_{VL} |
| 308 | CL_#24831 | HetFc-GSADGG-p40(S175V_A179T_S183T_S294N)-(G4S)3- |
| | | P35β |
| 309 | CL_#24832 | HetFc-GSADGG-p40-(G4S)3-p35_{ΔR}(L68A) |
| 310 | CL_#24833 | HetFc-GSADGG-p40-(G4S)3-p35_{ΔR}(R181A) |
| 311 | CL_#24834 | HetFc-GSADGG-p40-(G4S)3-p35_{ΔR}(V185A) |
| 312 | CL_#24835 | HetFc-GSADGG-p40-(G4S)3-p35_{ΔR}(E38R_K128E_K168E) |
| 313 | CL_#24836 | HetFc-GSADGG-p40-(G4S)3-p35_{ΔR}(P41S_I171Q_I175S) |
| 314 | CL_#24837 | HetFc-GSADGG-p40-(G4S)3-p35_{ΔR}(F39S_Y40S_Y167S) |
| 315 | CL_#24838 | HetFc-GSADGG-p40-(G4S)3-p35_{ΔR}(T43A_E45R_I47S_D48R) |
| 316 | CL_#24839 | HetFc-GSADGG-p40-(G4S)3- |
| | | p35_{ΔR}(T43A_E45R_E46K_147S_D48R_E50K) |
| 317 | CL_#24840 | HetFc-GSADGG-p40(D41S_E45R_K58S_E59S_K195D)- |
| | | (G4S)3-p35_{ΔR} |
| 318 | CL_#24841 | HetFc-GSADGG-p40(K99S_E100S_R159S)-(G4S)3-p35_{ΔR} |
| 319 | CL_#24842 | HetFc-GSADGG-p40(E187S_T202S_S204E)-(G4S)3-p35_{ΔR} |
| 320 | CL_#26498 | HetFc-(G4S)2-MSGRSANA-(G4S)2-Briak_{VH}(F27V)-GGS- |
| | | (G3S)4-G-Briak_{VL} |
| 340 | CL_#26320 | HetFc-GSADGG-p40-(G4S)3-p35_{ΔR}-G4S-(G3S)2-(G4S)4- |
| | | h6F6_{VL}-GGS-(G3S)4-G-h6F6_{VH} |
| 341 | CL_#26503 | HetFc-(G4S)2-(G3S)2-(G4S)2-Briak_{VH}-GGS-(G3S)4-G-Briak_{VL} |

^{a}“HetFc” can indicate either chain A or B of a heterodimeric Fc, may or may not include a wild-type or modified IgG1 hinge, and may or may not include additional mutations in the CH2 and or CH3 domains;
^{b}“ΔR” in “p35_{ΔR}” indicates removal of p35 N-terminal Arg residue;
^{c}“Hep” in “p40_{Hep}” indicates a mutated heparin binding loop

TABLE 24
Sequences

| SEQ | Clone | | |
|---|---|---|---|
| ID | # | Descr. | Sequence (amino acid or nucleic acid) |
| 1 | | Signal Pep. | MRPTWAWWLFLVLLLALWAPARG |
| 2 | | PCS^{a} | TSGRSANP |
| 3 | | PCS | LSGRSDNH |
| 4 | | PCS | GSGRSAQV |
| 5 | | PCS | GSSRNADV |
| 6 | | PCS | GTARSDNV |
| 7 | | PCS | GGGRVNNV |
| 8 | | PCS | MSARILQV |
| 9 | | PCS | GKGRSANA |
| 10 | | PCS | MSGRSANA |
| 11 | | Bria^{b} VH | QVQLVESGGGVVQPGRSLRLSCAASGFTFSSYGMHWVRQAPGKGLEWVA |
| | | | FIRYDGSNKYYADSVKGRFTISRDNSKNTLYLQMNSLRAEDTAVYYCKTH |
| | | | GSHDNWGQGTMVTVSS |
| 12 | | Bria VL | QSVLTQPPSVSGAPGQRVTISCSGSRSNIGSNTVKWYQQLPGTAPKLLIYYN |
| | | | DQRPSGVPDRFSGSKSGTSASLAITGLQAEDEADYYCQSYDRYTHPALLFG |
| | | | TGTKVTVL |
| 13 | | Bria | SYGMH |
| | | VHCDR1 | |
| 14 | | Bria | FIRYDGSNKYYADSVKG |
| | | VHCDR2 | |
| 15 | | Bria | HGSHDN |
| | | VHCDR3 | |
| 16 | | Bria | SGSRSNIGSNTVK |
| | | VLCDR1 | |
| 17 | | Bria | YNDQRPS |
| | | VLCDR2 | |
| 18 | | Bria | QSYDRYTHPALL |
| | | VLCDR3 | |
| 19 | | IL12 Hep | QGKSKREKK |
| | | Binding | |
| | | Loop | |
| 20 | 12153 | Full AA | EPKSSDKTHTCPPCPAPEAAGGPSVFLFPPKPKDTLMISRTPEVTCVVVSVS |
| | | | HEDPEVKFNWYVDGVEVHNAKTKPREEQYNSTYRVVSVLTVLHQDWLN |
| | | | GKEYKCKVSNKALPAPIEKTISKAKGQPREPQVYVLPPSRDELTKNQVSLL |
| | | | CLVKGFYPSDIAVEWESNGQPENNYLTWPPVLDSDGSFFLYSKLTVDKSR |
| | | | WQQGNVFSCSVMHEALHNHYTQKSLSLSPG |
| 21 | 12155 | Full AA | EPKSSDKTHTCPPCPAPEAAGGPSVFLFPPKPKDTLMISRTPEVTCVVVSVS |
| | | | HEDPEVKFNWYVDGVEVHNAKTKPREEQYNSTYRVVSVLTVLHQDWLN |
| | | | GKEYKCKVSNKALPAPIEKTISKAKGQPREPQVYVYPPSRDELTKNQVSLT |
| | | | CLVKGFYPSDIAVEWESNGQPENNYKTTPPVLDSDGSFALVSKLTVDKSR |
| | | | WQQGNVFSCSVMHEALHNHYTQKSLSLSPG |
| 22 | 17871 | Full AA | IWELKKDVYVVELDWYPDAPGEMVVLTCDTPEEDGITWTLDQSSEVLGSG |
| | | (heparin | KTLTIQVKEFGDAGQYTCHKGGEVLSHSLLLLHKKEDGIWSTDILKDQKEP |
| | | binding | KNKTFLRCEAKNYSGRFTCWWLTTISTDLTFSVKSSRGSSDPQGVTCGAAT |
| | | loop | LSAERVRGDNKEYEYSVECQEDSACPAAEESLPIEVMVDAVHKLKYENYT |
| | | underlined) | SSFFIRDIIKPDPPKNLQLKPLKNSRQVEVSWEYPDTWSTPHSYFSLTFCVQV |
| | | | QGKSKREKKDRVFTDKTSATVICRKNASISVRAQDRYYSSSWSEWASVPCS |
| 23 | 17872 | Full AA | RNLPVATPDPGMFPCLHHSQNLLRAVSNMLQKARQTLEFYPCTSEEIDHED |
| | | | ITKDKTSTVEACLPLELTKNESCLNSRETSFITNGSCLASRKTSFMMALCLSS |
| | | | IYEDLKMYQVEFKTMNAKLLMDPKRQIFLDQNMLAVIDELMQALNFNSET |
| | | | VPQKSSLEEPDFYKTKIKLCILLHAFRIRAVTIDRVMSYLNAS |
| 24 | 17875 | Full AA | EPKSSDKTHTCPPCPAPEAAGGPSVFLFPPKPKDTLMISRTPEVTCVVVSVS |
| | | | HEDPEVKFNWYVDGVEVHNAKTKPREEQYNSTYRVVSVLTVLHQDWLN |
| | | | GKEYKCKVSNKALPAPIEKTISKAKGQPREPQVYVYPPSRDELTKNQVSLT |
| | | | CLVKGFYPSDIAVEWESNGQPENNYKTTPPVLDSDGSFALVSKLTVDKSR |
| | | | WQQGNVFSCSVMHEALHNHYTQKSLSLSPGRNLPVATPDPGMFPCLHHSQ |
| | | | NLLRAVSNMLQKARQTLEFYPCTSEEIDHEDITKDKTSTVEACLPLELTKNE |
| | | | SCLNSRETSFITNGSCLASRKTSFMMALCLSSIYEDLKMYQVEFKTMNAKL |
| | | | LMDPKRQIFLDQNMLAVIDELMQALNFNSETVPQKSSLEEPDFYKTKIKLCI |
| | | | LLHAFRIRAVTIDRVMSYLNAS |
| 25 | 17876 | Full AA | EPKSSDKTHTCPPCPAPEAAGGPSVFLFPPKPKDTLMISRTPEVTCVVVSVS |
| | | | HEDPEVKFNWYVDGVEVHNAKTKPREEQYNSTYRVVSVLTVLHQDWLN |
| | | | GKEYKCKVSNKALPAPIEKTISKAKGQPREPQVYVYPPSRDELTKNQVSLT |
| | | | CLVKGFYPSDIAVEWESNGQPENNYKTTPPVLDSDGSFALVSKLTVDKSR |
| | | | WQQGNVFSCSVMHEALHNHYTQKSLSLSPGGSADGGIWELKKDVYVVEL |
| | | | DWYPDAPGEMVVLTCDTPEEDGITWTLDQSSEVLGSGKTLTIQVKEFGDA |
| | | | GQYTCHKGGEVLSHSLLLLHKKEDGIWSTDILKDQKEPKNKTFLRCEAKN |
| | | | YSGRFTCWWLTTISTDLTFSVKSSRGSSDPQGVTCGAATLSAERVRGDNKE |
| | | | YEYSVECQEDSACPAAEESLPIEVMVDAVHKLKYENYTSSFFIRDIIKPDPP |
| | | | KNLQLKPLKNSRQVEVSWEYPDTWSTPHSYFSLTFCVQVQGKSKREKKDR |
| | | | VFTDKTSATVICRKNASISVRAQDRYYSSSWSEWASVPCSGGGGSGGGGS |
| | | | GGGGSRNLPVATPDPGMFPCLHHSQNLLRAVSNMLQKARQTLEFYPCTSE |
| | | | EIDHEDITKDKTSTVEACLPLELTKNESCLNSRETSFITNGSCLASRKTSFMM |
| | | | ALCLSSIYEDLKMYQVEFKTMNAKLLMDPKRQIFLDQNMLAVIDELMQAL |
| | | | NFNSETVPQKSSLEEPDFYKTKIKLCILLHAFRIRAVTIDRVMSYLNAS |
| 26 | 17877 | Full AA | RNLPVATPDPGMFPCLHHSQNLLRAVSNMLQKARQTLEFYPCTSEEIDHED |
| | | | ITKDKTSTVEACLPLELTKNESCLNSRETSFITNGSCLASRKTSFMMALCLSS |
| | | | IYEDLKMYQVEFKTMNAKLLMDPKRQIFLDQNMLAVIDELMQALNFNSET |
| | | | VPQKSSLEEPDFYKTKIKLCILLHAFRIRAVTIDRVMSYLNASGGGGSGGGG |
| | | | SEPKSSDKTHTCPPCPAPEAAGGPSVFLFPPKPKDTLMISRTPEVTCVVVSVS |
| | | | HEDPEVKFNWYVDGVEVHNAKTKPREEQYNSTYRVVSVLTVLHQDWLN |
| | | | GKEYKCKVSNKALPAPIEKTISKAKGQPREPQVYVYPPSRDELTKNQVSLT |
| | | | CLVKGFYPSDIAVEWESNGQPENNYKTTPPVLDSDGSFALVSKLTVDKSR |
| | | | WQQGNVFSCSVMHEALHNHYTQKSLSLSPG |
| 27 | 17879 | Full AA | IWELKKDVYVVELDWYPDAPGEMVVLTCDTPEEDGITWTLDQSSEVLGSG |
| | | | KTLTIQVKEFGDAGQYTCHKGGEVLSHSLLLLHKKEDGIWSTDILKDQKEP |
| | | | KNKTFLRCEAKNYSGRFTCWWLTTISTDLTFSVKSSRGSSDPQGVTCGAAT |
| | | | LSAERVRGDNKEYEYSVECQEDSACPAAEESLPIEVMVDAVHKLKYENYT |
| | | | SSFFIRDIIKPDPPKNLQLKPLKNSRQVEVSWEYPDTWSTPHSYFSLTFCVQV |
| | | | QGKSKREKKDRVFTDKTSATVICRKNASISVRAQDRYYSSSWSEWASVPCS |
| | | | GGGGSGGGGSEPKSSDKTHTCPPCPAPEAAGGPSVFLFPPKPKDTLMISRTP |
| | | | EVTCVVVSVSHEDPEVKFNWYVDGVEVHNAKTKPREEQYNSTYRVVSVL |
| | | | TVLHQDWLNGKEYKCKVSNKALPAPIEKTISKAKGQPREPQVYVYPPSRD |
| | | | ELTKNQVSLTCLVKGFYPSDIAVEWESNGQPENNYKTTPPVLDSDGSFALV |
| | | | SKLTVDKSRWQQGNVFSCSVMHEALHNHYTQKSLSLSPG |
| 28 | 17880 | Full AA | EPKSSDKTHTCPPCPAPEAAGGPSVFLFPPKPKDTLMISRTPEVTCVVVSVS |
| | | | HEDPEVKFNWYVDGVEVHNAKTKPREEQYNSTYRVVSVLTVLHQDWLN |
| | | | GKEYKCKVSNKALPAPIEKTISKAKGQPREPQVYVLPPSRDELTKNQVSLL |
| | | | CLVKGFYPSDIAVEWESNGQPENNYLTWPPVLDSDGSFFLYSKLTVDKSR |
| | | | WQQGNVFSCSVMHEALHNHYTQKSLSLSPGGGGGSGGGGSIWELKKDVY |
| | | | VVELDWYPDAPGEMVVLTCDTPEEDGITWTLDQSSEVLGSGKTLTIQVKEF |
| | | | GDAGQYTCHKGGEVLSHSLLLLHKKEDGIWSTDILKDQKEPKNKTFLRCE |
| | | | AKNYSGRFTCWWLTTISTDLTFSVKSSRGSSDPQGVTCGAATLSAERVRGD |
| | | | NKEYEYSVECQEDSACPAAEESLPIEVMVDAVHKLKYENYTSSFFIRDIIKP |
| | | | DPPKNLQLKPLKNSRQVEVSWEYPDTWSTPHSYFSLTFCVQVQGKSKREK |
| | | | KDRVFTDKTSATVICRKNASISVRAQDRYYSSSWSEWASVPCS |
| 29 | 17881 | Full AA | EPKSSDKTHTCPPCPAPEAAGGPSVFLFPPKPKDTLMISRTPEVTCVVVSVS |
| | | | HEDPEVKFNWYVDGVEVHNAKTKPREEQYNSTYRVVSVLTVLHQDWLN |
| | | | GKEYKCKVSNKALPAPIEKTISKAKGQPREPQVYVLPPSRDELTKNQVSLL |
| | | | CLVKGFYPSDIAVEWESNGQPENNYLTWPPVLDSDGSFFLYSKLTVDKSR |
| | | | WQQGNVFSCSVMHEALHNHYTQKSLSLSPGRNLPVATPDPGMFPCLHHSQ |
| | | | NLLRAVSNMLQKARQTLEFYPCTSEEIDHEDITKDKTSTVEACLPLELTKNE |
| | | | SCLNSRETSFITNGSCLASRKTSFMMALCLSSIYEDLKMYQVEFKTMNAKL |
| | | | LMDPKRQIFLDQNMLAVIDELMQALNFNSETVPQKSSLEEPDFYKTKIKLCI |
| | | | LLHAFRIRAVTIDRVMSYLNAS |
| 30 | 17906 | Full AA | EPKSSDKTHTCPPCPAPEAAGGPSVFLFPPKPKDTLMISRTPEVTCVVVSVS |
| | | | HEDPEVKFNWYVDGVEVHNAKTKPREEQYNSTYRVVSVLTVLHQDWLN |
| | | | GKEYKCKVSNKALPAPIEKTISKAKGQPREPQVYVYPPSRDELTKNQVSLT |
| | | | CLVKGFYPSDIAVEWESNGQPENNYKTTPPVLDSDGSFALVSKLTVDKSR |
| | | | WQQGNVFSCSVMHEALHNHYTQKSLSLSPGRAVPGGSSPAWTQCQQLSQ |
| | | | KLCTLAWSAHPLVGHMDLREEGDEETTNDVPHIQCGDGCDPQGLRDNSQF |
| | | | CLQRIHQGLIFYEKLLGSDIFTGEPSLLPDSPVGQLHASLLGLSQLLQPEGHH |
| | | | WETQQIPSLSPSQPWQRLLLRFKILRSLQAFVAVAARVFAHGAATLSP |
| 31 | 17907 | Full AA | RAVPGGSSPAWTQCQQLSQKLCTLAWSAHPLVGHMDLREEGDEETTNDV |
| | | | PHIQCGDGCDPQGLRDNSQFCLQRIHQGLIFYEKLLGSDIFTGEPSLLPDSPV |
| | | | GQLHASLLGLSQLLQPEGHHWETQQIPSLSPSQPWQRLLLRFKILRSLQAFV |
| | | | AVAARVFAHGAATLSPGGGGSGGGGSEPKSSDKTHTCPPCPAPEAAGGPS |
| | | | VFLFPPKPKDTLMISRTPEVTCVVVSVSHEDPEVKFNWYVDGVEVHNAKT |
| | | | KPREEQYNSTYRVVSVLTVLHQDWLNGKEYKCKVSNKALPAPIEKTISKA |
| | | | KGQPREPQVYVYPPSRDELTKNQVSLTCLVKGFYPSDIAVEWESNGQPENN |
| | | | YKTTPPVLDSDGSFALVSKLTVDKSRWQQGNVFSCSVMHEALHNHYTQKS |
| | | | LSLSPG |
| 32 | 17908 | Full AA | RAVPGGSSPAWTQCQQLSQKLCTLAWSAHPLVGHMDLREEGDEETTNDV |
| | | | PHIQCGDGCDPQGLRDNSQFCLQRIHQGLIFYEKLLGSDIFTGEPSLLPDSPV |
| | | | GQLHASLLGLSQLLQPEGHHWETQQIPSLSPSQPWQRLLLRFKILRSLQAFV |
| | | | AVAARVFAHGAATLSP |
| 33 | 17942 | Full AA | EPKSSDKTHTCPPCPAPEAAGGPSVFLFPPKPKDTLMISRTPEVTCVVVSVS |
| | | | HEDPEVKFNWYVDGVEVHNAKTKPREEQYNSTYRVVSVLTVLHQDWLN |
| | | | GKEYKCKVSNKALPAPIEKTISKAKGQPREPQVYVYPPSRDELTKNQVSLT |
| | | | CLVKGFYPSDIAVEWESNGQPENNYKTTPPVLDSDGSFALVSKLTVDKSR |
| | | | WQQGNVFSCSVMHEALHNHYTQKSLSLSPGGGGGSGGGGSIWELKKDVY |
| | | | VVELDWYPDAPGEMVVLTCDTPEEDGITWTLDQSSEVLGSGKTLTIQVKEF |
| | | | GDAGQYTCHKGGEVLSHSLLLLHKKEDGIWSTDILKDQKEPKNKTFLRCE |
| | | | AKNYSGRFTCWWLTTISTDLTFSVKSSRGSSDPQGVTCGAATLSAERVRGD |
| | | | NKEYEYSVECQEDSACPAAEESLPIEVMVDAVHKLKYENYTSSFFIRDIIKP |
| | | | DPPKNLQLKPLKNSRQVEVSWEYPDTWSTPHSYFSLTFCVQVQGKSKREK |
| | | | KDRVFTDKTSATVICRKNASISVRAQDRYYSSSWSEWASVPCS |
| 34 | 17945 | Full AA | EPKSSDKTHTCPPCPAPEAAGGPSVFLFPPKPKDTLMISRTPEVTCVVVSVS |
| | | | HEDPEVKFNWYVDGVEVHNAKTKPREEQYNSTYRVVSVLTVLHQDWLN |
| | | | GKEYKCKVSNKALPAPIEKTISKAKGQPREPQVYVYPPSRDELTKNQVSLT |
| | | | CLVKGFYPSDIAVEWESNGQPENNYKTTPPVLDSDGSFALVSKLTVDKSR |
| | | | WQQGNVFSCSVMHEALHNHYTQKSLSLSPGGSADGGIWELKKDVYVVEL |
| | | | DWYPDAPGEMVVLTCDTPEEDGITWTLDQSSEVLGSGKTLTIQVKEFGDA |
| | | | GQYTCHKGGEVLSHSLLLLHKKEDGIWSTDILKDQKEPKNKTFLRCEAKN |
| | | | YSGRFTCWWLTTISTDLTFSVKSSRGSSDPQGVTCGAATLSAERVRGDNKE |
| | | | YEYSVECQEDSACPAAEESLPIEVMVDAVHKLKYENYTSSFFIRDIIKPDPP |
| | | | KNLQLKPLKNSRQVEVSWEYPDTWSTPHSYFSLTFCVQVQGKSKREKKDR |
| | | | VFTDKTSATVICRKNASISVRAQDRYYSSSWSEWASVPCSGGGGSGGGGS |
| | | | GGGGSGGGGSRAVPGGSSPAWTQCQQLSQKLCTLAWSAHPLVGHMDLRE |
| | | | EGDEETTNDVPHIQCGDGCDPQGLRDNSQFCLQRIHQGLIFYEKLLGSDIFT |
| | | | GEPSLLPDSPVGQLHASLLGLSQLLQPEGHHWETQQIPSLSPSQPWQRLLLR |
| | | | FKILRSLQAFVAVAARVFAHGAATLSP |
| 35 | 18939 | Full AA | QVQLVESGGGVVQPGRSLRLSCAASGFTFSSYGMHWVRQAPGKGLEWVA |
| | | | FIRYDGSNKYYADSVKGRFTISRDNSKNTLYLQMNSLRAEDTAVYYCKTH |
| | | | GSHDNWGQGTMVTVSSASTKGPSVFPLAPSSKSTSGGTAALGCLVKDYFP |
| | | | EPVTVSWNSGALTSGVHTFPAVLQSSGLYSLSSVVTVPSSSLGTQTYICNVN |
| | | | HKPSNTKVDKRVEPKSCDKTHTCPPCPAPEAAGGPSVFLFPPKPKDTLMISR |
| | | | TPEVTCVVVSVSHEDPEVKFNWYVDGVEVHNAKTKPREEQYNSTYRVVS |
| | | | VLTVLHQDWLNGKEYKCKVSNKALPAPIEKTISKAKGQPREPQVYVLPPSR |
| | | | DELTKNQVSLLCLVKGFYPSDIAVEWESNGQPENNYLTWPPVLDSDGSFFL |
| | | | YSKLTVDKSRWQQGNVFSCSVMHEALHNHYTQKSLSLSPG |
| 36 | 18940 | Full AA | QSVLTQPPSVSGAPGQRVTISCSGSRSNIGSNTVKWYQQLPGTAPKLLIYYN |
| | | | DQRPSGVPDRFSGSKSGTSASLAITGLQAEDEADYYCQSYDRYTHPALLFG |
| | | | TGTKVTVLGQPKAAPSVTLFPPSSEELQANKATLVCLISDFYPGAVTVAWK |
| | | | ADSSPVKAGVETTTPSKQSNNKYAASSYLSLTPEQWKSHRSYSCQVTHEGS |
| | | | TVEKTVAPAECS |
| 37 | 18942 | Full AA | QVQLVESGGGVVQPGRSLRLSCAASGFTFSSYGMHWVRQAPGKGLEWVA |
| | | | FIRYDGSNKYYADSVKGRFTISRDNSKNTLYLQMNSLRAEDTAVYYCKTH |
| | | | GSHDNWGQGTMVTVSSGGGGSGGGGSGGGGSQSVLTQPPSVSGAPGQRV |
| | | | TISCSGSRSNIGSNTVKWYQQLPGTAPKLLIYYNDQRPSGVPDRFSGSKSGT |
| | | | SASLAITGLQAEDEADYYCQSYDRYTHPALLFGTGTKVTVLAAEPKSSDKT |
| | | | HTCPPCPAPEAAGGPSVFLFPPKPKDTLMISRTPEVTCVVVSVSHEDPEVKF |
| | | | NWYVDGVEVHNAKTKPREEQYNSTYRVVSVLTVLHQDWLNGKEYKCKV |
| | | | SNKALPAPIEKTISKAKGQPREPQVYVLPPSRDELTKNQVSLLCLVKGFYPS |
| | | | DIAVEWESNGQPENNYLTWPPVLDSDGSFFLYSKLTVDKSRWQQGNVFSC |
| | | | SVMHEALHNHYTQKSLSLSPG |
| 38 | 18943 | Full AA | QSVLTQPPSVSGAPGQRVTISCSGSRSNIGSNTVKWYQQLPGTAPKLLIYYN |
| | | | DQRPSGVPDRFSGSKSGTSASLAITGLQAEDEADYYCQSYDRYTHPALLFG |
| | | | TGTKVTVLGGGGSGGGGSGGGGSQVQLVESGGGVVQPGRSLRLSCAASGF |
| | | | TFSSYGMHWVRQAPGKGLEWVAFIRYDGSNKYYADSVKGRFTISRDNSK |
| | | | NTLYLQMNSLRAEDTAVYYCKTHGSHDNWGQGTMVTVSSAAEPKSSDKT |
| | | | HTCPPCPAPEAAGGPSVFLFPPKPKDTLMISRTPEVTCVVVSVSHEDPEVKF |
| | | | NWYVDGVEVHNAKTKPREEQYNSTYRVVSVLTVLHQDWLNGKEYKCKV |
| | | | SNKALPAPIEKTISKAKGQPREPQVYVLPPSRDELTKNQVSLLCLVKGFYPS |
| | | | DIAVEWESNGQPENNYLTWPPVLDSDGSFFLYSKLTVDKSRWQQGNVFSC |
| | | | SVMHEALHNHYTQKSLSLSPG |
| 39 | 18953 | Full AA | EPKSSDKTHTCPPCPAPEAAGGPSVFLFPPKPKDTLMISRTPEVTCVVVSVS |
| | | | HEDPEVKFNWYVDGVEVHNAKTKPREEQYNSTYRVVSVLTVLHQDWLN |
| | | | GKEYKCKVSNKALPAPIEKTISKAKGQPREPQVYVLPPSRDELTKNQVSLL |
| | | | CLVKGFYPSDIAVEWESNGQPENNYLTWPPVLDSDGSFFLYSKLTVDKSR |
| | | | WQQGNVFSCSVMHEALHNHYTQKSLSLSPGGGGGSLSGRSDNHGGGGSG |
| | | | GGGSGGGGSGGGGSKIDACKRGDVTVKPSHVILLGSTVNITCSLKPRQGCF |
| | | | HYSRRNKLILYKFDRRINFHHGHSLNSQVTGLPLGTTLFVCKLACINSDEIQI |
| | | | CGAEIFVGVAPEQPQNLSCIQKGEQGTVACTWERGRDTHLYTEYTLQLSGP |
| | | | KNLTWQKQCKDIYCDYLDFGINLTPESPESNFTAKVTAVNSLGSSSSLPSTF |
| | | | TFLDIVRPLPPWDIRIKFQKASVSRCTLYWRDEGLVLLNRLRYRPSNSRLW |
| | | | NMVNVTKAKGRHDLLDLKPFTEYEFQISSKLHLYKGSWSDWSESLRAQTP |
| | | | EEEP |
| 40 | 18954 | Full AA | KIDACKRGDVTVKPSHVILLGSTVNITCSLKPRQGCFHYSRRNKLILYKFDR |
| | | | RINFHHGHSLNSQVTGLPLGTTLFVCKLACINSDEIQICGAEIFVGVAPEQPQ |
| | | | NLSCIQKGEQGTVACTWERGRDTHLYTEYTLQLSGPKNLTWQKQCKDIYC |
| | | | DYLDFGINLTPESPESNFTAKVTAVNSLGSSSSLPSTFTFLDIVRPLPPWDIRI |
| | | | KFQKASVSRCTLYWRDEGLVLLNRLRYRPSNSRLWNMVNVTKAKGRHDL |
| | | | LDLKPFTEYEFQISSKLHLYKGSWSDWSESLRAQTPEEEPGGGGSGGGGSL |
| | | | SGRSDNHGGGGSEPKSSDKTHTCPPCPAPEAAGGPSVFLFPPKPKDTLMISR |
| | | | TPEVTCVVVSVSHEDPEVKFNWYVDGVEVHNAKTKPREEQYNSTYRVVS |
| | | | VLTVLHQDWLNGKEYKCKVSNKALPAPIEKTISKAKGQPREPQVYVLPPSR |
| | | | DELTKNQVSLLCLVKGFYPSDIAVEWESNGQPENNYLTWPPVLDSDGSFFL |
| | | | YSKLTVDKSRWQQGNVFSCSVMHEALHNHYTQKSLSLSPG |
| 41 | 18956 | Full AA | KIDACKRGDVTVKPSHVILLGSTVNITCSLKPRQGCFHYSRRNKLILYKFDR |
| | | | RINFHHGHSLNSQVTGLPLGTTLFVCKLACINSDEIQICGAEIFVGVAPGGG |
| | | | GSGGGGSLSGRSDNHGGGGSRNLPVATPDPGMFPCLHHSQNLLRAVSNML |
| | | | QKARQTLEFYPCTSEEIDHEDITKDKTSTVEACLPLELTKNESCLNSRETSFI |
| | | | TNGSCLASRKTSFMMALCLSSIYEDLKMYQVEFKTMNAKLLMDPKRQIFL |
| | | | DQNMLAVIDELMQALNFNSETVPQKSSLEEPDFYKTKIKLCILLHAFRIRAV |
| | | | TIDRVMSYLNASGGGGSGGGGSEPKSSDKTHTCPPCPAPEAAGGPSVFLFPP |
| | | | KPKDTLMISRTPEVTCVVVSVSHEDPEVKFNWYVDGVEVHNAKTKPREEQ |
| | | | YNSTYRVVSVLTVLHQDWLNGKEYKCKVSNKALPAPIEKTISKAKGQPRE |
| | | | PQVYVYPPSRDELTKNQVSLTCLVKGFYPSDIAVEWESNGQPENNYKTTPP |
| | | | VLDSDGSFALVSKLTVDKSRWQQGNVFSCSVMHEALHNHYTQKSLSLSPG |
| 42 | 18957 | Full AA | EPKSSDKTHTCPPCPAPEAAGGPSVFLFPPKPKDTLMISRTPEVTCVVVSVS |
| | | | HEDPEVKFNWYVDGVEVHNAKTKPREEQYNSTYRVVSVLTVLHQDWLN |
| | | | GKEYKCKVSNKALPAPIEKTISKAKGQPREPQVYVYPPSRDELTKNQVSLT |
| | | | CLVKGFYPSDIAVEWESNGQPENNYKTTPPVLDSDGSFALVSKLTVDKSR |
| | | | WQQGNVFSCSVMHEALHNHYTQKSLSLSPGGSADGGIWELKKDVYVVEL |
| | | | DWYPDAPGEMVVLTCDTPEEDGITWTLDQSSEVLGSGKTLTIQVKEFGDA |
| | | | GQYTCHKGGEVLSHSLLLLHKKEDGIWSTDILKDQKEPKNKTFLRCEAKN |
| | | | YSGRFTCWWLTTISTDLTFSVKSSRGSSDPQGVTCGAATLSAERVRGDNKE |
| | | | YEYSVECQEDSACPAAEESLPIEVMVDAVHKLKYENYTSSFFIRDIIKPDPP |
| | | | KNLQLKPLKNSRQVEVSWEYPDTWSTPHSYFSLTFCVQVQGKSKREKKDR |
| | | | VFTDKTSATVICRKNASISVRAQDRYYSSSWSEWASVPCSGGGGSGGGGS |
| | | | GGGGSRNLPVATPDPGMFPCLHHSQNLLRAVSNMLQKARQTLEFYPCTSE |
| | | | EIDHEDITKDKTSTVEACLPLELTKNESCLNSRETSFITNGSCLASRKTSFMM |
| | | | ALCLSSIYEDLKMYQVEFKTMNAKLLMDPKRQIFLDQNMLAVIDELMQAL |
| | | | NFNSETVPQKSSLEEPDFYKTKIKLCILLHAFRIRAVTIDRVMSYLNASGGG |
| | | | GSLSGRSDNHGGGGSGGGGSKIDACKRGDVTVKPSHVILLGSTVNITCSLK |
| | | | PRQGCFHYSRRNKLILYKFDRRINFHHGHSLNSQVTGLPLGTTLFVCKLACI |
| | | | NSDEIQICGAEIFVGVAP |
| 43 | 21415 | Full AA | IWELKKDVYVVELDWYPDAPGEMVVLTCDTPEEDGITWTLDQSSEVLGSG |
| | | | KTLTIQVKEFGDAGQYTCHKGGEVLSHSLLLLHKKEDGIWSTDILKDQKEP |
| | | | KNKTFLRCEAKNYSGRFTCWWLTTISTDLTFSVKSSRGSSDPQGVTCGAAT |
| | | | LSAERVRGDNKEYEYSVECQEDSACPAAEESLPIEVMVDAVHKLKYENYT |
| | | | SSFFIRDIIKPDPPKNLQLKPLKNSRQVEVSWEYPDTWSTPHSYFSLTFCVQV |
| | | | QGKSKREKKDRVFTDKTSATVICRKNASISVRAQDRYYSSSWSEWASVPCS |
| | | | GGGGSGGGGSMSGRSANAGGGGSGGGGSGGGGSQSVLTQPPSVSGAPGQ |
| | | | RVTISCSGSRSNIGSNTVKWYQQLPGTAPKLLIYYNDQRPSGVPDRFSGSKS |
| | | | GTSASLAITGLQAEDEADYYCQSYDRYTHPALLFGTGTKVTVLGGGGSGG |
| | | | GGSGGGGSQVQLVESGGGVVQPGRSLRLSCAASGFTFSSYGMHWVRQAP |
| | | | GKGLEWVAFIRYDGSNKYYADSVKGRFTISRDNSKNTLYLQMNSLRAEDT |
| | | | AVYYCKTHGSHDNWGQGTMVTVSS |
| 44 | 21416 | Full AA | EPKSSDKTHTCPPCPAPEAAGGPSVFLFPPKPKDTLMISRTPEVTCVVVSVS |
| | | | HEDPEVKFNWYVDGVEVHNAKTKPREEQYNSTYRVVSVLTVLHQDWLN |
| | | | GKEYKCKVSNKALPAPIEKTISKAKGQPREPQVYVYPPSRDELTKNQVSLT |
| | | | CLVKGFYPSDIAVEWESNGQPENNYKTTPPVLDSDGSFALVSKLTVDKSR |
| | | | WQQGNVFSCSVMHEALHNHYTQKSLSLSPGRNLPVATPDPGMFPCLHHSQ |
| | | | NLLRAVSNMLQKARQTLEFYPCTSEEIDHEDITKDKTSTVEACLPLELTKNE |
| | | | SCLNSRETSFITNGSCLASRKTSFMMALCLSSIYEDLKMYQVEFKTMNAKL |
| | | | LMDPKRQIFLDQNMLAVIDELMQALNFNSETVPQKSSLEEPDFYKTKIKLCI |
| | | | LLHAFRIRAVTIDRVMSYLNASGGGGSGGGGSMSGRSANAGGGGSGGGGS |
| | | | GGGGSQSVLTQPPSVSGAPGQRVTISCSGSRSNIGSNTVKWYQQLPGTAPK |
| | | | LLIYYNDQRPSGVPDRFSGSKSGTSASLAITGLQAEDEADYYCQSYDRYTH |
| | | | PALLFGTGTKVTVLGGGGSGGGGSGGGGSQVQLVESGGGVVQPGRSLRLS |
| | | | CAASGFTFSSYGMHWVRQAPGKGLEWVAFIRYDGSNKYYADSVKGRFTIS |
| | | | RDNSKNTLYLQMNSLRAEDTAVYYCKTHGSHDNWGQGTMVTVSS |
| 45 | 21417 | Full AA | EPKSSDKTHTCPPCPAPEAAGGPSVFLFPPKPKDTLMISRTPEVTCVVVSVS |
| | | | HEDPEVKFNWYVDGVEVHNAKTKPREEQYNSTYRVVSVLTVLHQDWLN |
| | | | GKEYKCKVSNKALPAPIEKTISKAKGQPREPQVYVLPPSRDELTKNQVSLL |
| | | | CLVKGFYPSDIAVEWESNGQPENNYLTWPPVLDSDGSFFLYSKLTVDKSR |
| | | | WQQGNVFSCSVMHEALHNHYTQKSLSLSPGGGGGSGGGGSMSGRSANAG |
| | | | GGGSGGGGSQSVLTQPPSVSGAPGQRVTISCSGSRSNIGSNTVKWYQQLPG |
| | | | TAPKLLIYYNDQRPSGVPDRFSGSKSGTSASLAITGLQAEDEADYYCQSYD |
| | | | RYTHPALLFGTGTKVTVLGGGGSGGGGSGGGGSQVQLVESGGGVVQPGR |
| | | | SLRLSCAASGFTFSSYGMHWVRQAPGKGLEWVAFIRYDGSNKYYADSVK |
| | | | GRFTISRDNSKNTLYLQMNSLRAEDTAVYYCKTHGSHDNWGQGTMVTVS |
| | | | S |
| 46 | 21418 | Full AA | QVQLVESGGGVVQPGRSLRLSCAASGFTFSSYGMHWVRQAPGKGLEWVA |
| | | | FIRYDGSNKYYADSVKGRFTISRDNSKNTLYLQMNSLRAEDTAVYYCKTH |
| | | | GSHDNWGQGTMVTVSSGGGGSGGGGSGGGGSQSVLTQPPSVSGAPGQRV |
| | | | TISCSGSRSNIGSNTVKWYQQLPGTAPKLLIYYNDQRPSGVPDRFSGSKSGT |
| | | | SASLAITGLQAEDEADYYCQSYDRYTHPALLFGTGTKVTVLGGGGSGGGG |
| | | | SGGGGSMSGRSANAGGGGSGGGGSIWELKKDVYVVELDWYPDAPGEMV |
| | | | VLTCDTPEEDGITWTLDQSSEVLGSGKTLTIQVKEFGDAGQYTCHKGGEVL |
| | | | SHSLLLLHKKEDGIWSTDILKDQKEPKNKTFLRCEAKNYSGRFTCWWLTTI |
| | | | STDLTFSVKSSRGSSDPQGVTCGAATLSAERVRGDNKEYEYSVECQEDSAC |
| | | | PAAEESLPIEVMVDAVHKLKYENYTSSFFIRDIIKPDPPKNLQLKPLKNSRQ |
| | | | VEVSWEYPDTWSTPHSYFSLTFCVQVQGKSKREKKDRVFTDKTSATVICR |
| | | | KNASISVRAQDRYYSSSWSEWASVPCSGGGGSGGGGSEPKSSDKTHTCPPC |
| | | | PAPEAAGGPSVFLFPPKPKDTLMISRTPEVTCVVVSVSHEDPEVKFNWYVD |
| | | | GVEVHNAKTKPREEQYNSTYRVVSVLTVLHQDWLNGKEYKCKVSNKALP |
| | | | APIEKTISKAKGQPREPQVYVYPPSRDELTKNQVSLTCLVKGFYPSDIAVEW |
| | | | ESNGQPENNYKTTPPVLDSDGSFALVSKLTVDKSRWQQGNVFSCSVMHEA |
| | | | LHNHYTQKSLSLSPG |
| 47 | 21419 | Full AA | RNLPVATPDPGMFPCLHHSQNLLRAVSNMLQKARQTLEFYPCTSEEIDHED |
| | | | ITKDKTSTVEACLPLELTKNESCLNSRETSFITNGSCLASRKTSFMMALCLSS |
| | | | IYEDLKMYQVEFKTMNAKLLMDPKRQIFLDQNMLAVIDELMQALNFNSET |
| | | | VPQKSSLEEPDFYKTKIKLCILLHAFRIRAVTIDRVMSYLNASGGGGSGGGG |
| | | | SMSGRSANAGGGGSGGGGSGGGGSQSVLTQPPSVSGAPGQRVTISCSGSRS |
| | | | NIGSNTVKWYQQLPGTAPKLLIYYNDQRPSGVPDRFSGSKSGTSASLAITGL |
| | | | QAEDEADYYCQSYDRYTHPALLFGTGTKVTVLGGGGSGGGGSGGGGSQV |
| | | | QLVESGGGVVQPGRSLRLSCAASGFTFSSYGMHWVRQAPGKGLEWVAFIR |
| | | | YDGSNKYYADSVKGRFTISRDNSKNTLYLQMNSLRAEDTAVYYCKTHGS |
| | | | HDNWGQGTMVTVSS |
| 48 | 21421 | Full AA | EPKSSDKTHTCPPCPAPEAAGGPSVFLFPPKPKDTLMISRTPEVTCVVVSVS |
| | | | HEDPEVKFNWYVDGVEVHNAKTKPREEQYNSTYRVVSVLTVLHQDWLN |
| | | | GKEYKCKVSNKALPAPIEKTISKAKGQPREPQVYVYPPSRDELTKNQVSLT |
| | | | CLVKGFYPSDIAVEWESNGQPENNYKTTPPVLDSDGSFALVSKLTVDKSR |
| | | | WQQGNVFSCSVMHEALHNHYTQKSLSLSPGGGGGSGGGGSIWELKKDVY |
| | | | VVELDWYPDAPGEMVVLTCDTPEEDGITWTLDQSSEVLGSGKTLTIQVKEF |
| | | | GDAGQYTCHKGGEVLSHSLLLLHKKEDGIWSTDILKDQKEPKNKTFLRCE |
| | | | AKNYSGRFTCWWLTTISTDLTFSVKSSRGSSDPQGVTCGAATLSAERVRGD |
| | | | NKEYEYSVECQEDSACPAAEESLPIEVMVDAVHKLKYENYTSSFFIRDIIKP |
| | | | DPPKNLQLKPLKNSRQVEVSWEYPDTWSTPHSYFSLTFCVQVQGKSKREK |
| | | | KDRVFTDKTSATVICRKNASISVRAQDRYYSSSWSEWASVPCSGGGGSGG |
| | | | GGSMSGRSANAGGGGSGGGGSGGGGSQSVLTQPPSVSGAPGQRVTISCSG |
| | | | SRSNIGSNTVKWYQQLPGTAPKLLIYYNDQRPSGVPDRFSGSKSGTSASLAI |
| | | | TGLQAEDEADYYCQSYDRYTHPALLFGTGTKVTVLGGGGSGGGGSGGGG |
| | | | SQVQLVESGGGVVQPGRSLRLSCAASGFTFSSYGMHWVRQAPGKGLEWV |
| | | | AFIRYDGSNKYYADSVKGRFTISRDNSKNTLYLQMNSLRAEDTAVYYCKT |
| | | | HGSHDNWGQGTMVTVSS |
| 49 | 21423 | Full AA | EPKSSDKTHTCPPCPAPEAAGGPSVFLFPPKPKDTLMISRTPEVTCVVVSVS |
| | | | HEDPEVKFNWYVDGVEVHNAKTKPREEQYNSTYRVVSVLTVLHQDWLN |
| | | | GKEYKCKVSNKALPAPIEKTISKAKGQPREPQVYVYPPSRDELTKNQVSLT |
| | | | CLVKGFYPSDIAVEWESNGQPENNYKTTPPVLDSDGSFALVSKLTVDKSR |
| | | | WQQGNVFSCSVMHEALHNHYTQKSLSLSPGGSADGGIWELKKDVYVVEL |
| | | | DWYPDAPGEMVVLTCDTPEEDGITWTLDQSSEVLGSGKTLTIQVKEFGDA |
| | | | GQYTCHKGGEVLSHSLLLLHKKEDGIWSTDILKDQKEPKNKTFLRCEAKN |
| | | | YSGRFTCWWLTTISTDLTFSVKSSRGSSDPQGVTCGAATLSAERVRGDNKE |
| | | | YEYSVECQEDSACPAAEESLPIEVMVDAVHKLKYENYTSSFFIRDIIKPDPP |
| | | | KNLQLKPLKNSRQVEVSWEYPDTWSTPHSYFSLTFCVQVQGKSKREKKDR |
| | | | VFTDKTSATVICRKNASISVRAQDRYYSSSWSEWASVPCSGGGGSGGGGS |
| | | | GGGGSRNLPVATPDPGMFPCLHHSQNLLRAVSNMLQKARQTLEFYPCTSE |
| | | | EIDHEDITKDKTSTVEACLPLELTKNESCLNSRETSFITNGSCLASRKTSFMM |
| | | | ALCLSSIYEDLKMYQVEFKTMNAKLLMDPKRQIFLDQNMLAVIDELMQAL |
| | | | NFNSETVPQKSSLEEPDFYKTKIKLCILLHAFRIRAVTIDRVMSYLNASGGG |
| | | | GSGGGGSGGGGSMSGRSANAGGGGSGGGGSGGGGSGGGGSQSVLTQPPS |
| | | | VSGAPGQRVTISCSGSRSNIGSNTVKWYQQLPGTAPKLLIYYNDQRPSGVP |
| | | | DRFSGSKSGTSASLAITGLQAEDEADYYCQSYDRYTHPALLFGTGTKVTVL |
| | | | GGGGSGGGGSGGGGSQVQLVESGGGVVQPGRSLRLSCAASGFTFSSYGMH |
| | | | WVRQAPGKGLEWVAFIRYDGSNKYYADSVKGRFTISRDNSKNTLYLQMN |
| | | | SLRAEDTAVYYCKTHGSHDNWGQGTMVTVSS |
| 50 | 21446 | Full AA | QVQLVESGGGVVQPGRSLRLSCAASGFTFSSYGMHWVRQAPGKGLEWVA |
| | | | FIRYDGSNKYYADSVKGRFTISRDNSKNTLYLQMNSLRAEDTAVYYCKTH |
| | | | GSHDNWGQGTMVTVSSGGGGSGGGGSGGGGSQSVLTQPPSVSGAPGQRV |
| | | | TISCSGSRSNIGSNTVKWYQQLPGTAPKLLIYYNDQRPSGVPDRFSGSKSGT |
| | | | SASLAITGLQAEDEADYYCQSYDRYTHPALLFGTGTKVTVLGGGGSGGGG |
| | | | SMSGRSANAGGGGSGGGGSIWELKKDVYVVELDWYPDAPGEMVVLTCD |
| | | | TPEEDGITWTLDQSSEVLGSGKTLTIQVKEFGDAGQYTCHKGGEVLSHSLL |
| | | | LLHKKEDGIWSTDILKDQKEPKNKTFLRCEAKNYSGRFTCWWLTTISTDLT |
| | | | FSVKSSRGSSDPQGVTCGAATLSAERVRGDNKEYEYSVECQEDSACPAAEE |
| | | | SLPIEVMVDAVHKLKYENYTSSFFIRDIIKPDPPKNLQLKPLKNSRQVEVSW |
| | | | EYPDTWSTPHSYFSLTFCVQVQGKSKREKKDRVFTDKTSATVICRKNASIS |
| | | | VRAQDRYYSSSWSEWASVPCS |
| 51 | 21447 | Full AA | QVQLVESGGGVVQPGRSLRLSCAASGFTFSSYGMHWVRQAPGKGLEWVA |
| | | | FIRYDGSNKYYADSVKGRFTISRDNSKNTLYLQMNSLRAEDTAVYYCKTH |
| | | | GSHDNWGQGTMVTVSSGGGGSGGGGSGGGGSQSVLTQPPSVSGAPGQRV |
| | | | TISCSGSRSNIGSNTVKWYQQLPGTAPKLLIYYNDQRPSGVPDRFSGSKSGT |
| | | | SASLAITGLQAEDEADYYCQSYDRYTHPALLFGTGTKVTVLGGGGSGGGG |
| | | | SGGGGSGGGGSMSGRSANAGGGGSGGGGSGGGGSRNLPVATPDPGMFPC |
| | | | LHHSQNLLRAVSNMLQKARQTLEFYPCTSEEIDHEDITKDKTSTVEACLPLE |
| | | | LTKNESCLNSRETSFITNGSCLASRKTSFMMALCLSSIYEDLKMYQVEFKT |
| | | | MNAKLLMDPKRQIFLDQNMLAVIDELMQALNFNSETVPQKSSLEEPDFYK |
| | | | TKIKLCILLHAFRIRAVTIDRVMSYLNAS |
| 52 | 21451 | Full AA | QVQLVESGGGVVQPGRSLRLSCAASGFTFSSYGMHWVRQAPGKGLEWVA |
| | | | FIRYDGSNKYYADSVKGRFTISRDNSKNTLYLQMNSLRAEDTAVYYCKTH |
| | | | GSHDNWGQGTMVTVSSGGGGSGGGGSGGGGSQSVLTQPPSVSGAPGQRV |
| | | | TISCSGSRSNIGSNTVKWYQQLPGTAPKLLIYYNDQRPSGVPDRFSGSKSGT |
| | | | SASLAITGLQAEDEADYYCQSYDRYTHPALLFGTGTKVTVLGGGGSGGGG |
| | | | SGGGGSGGGGSMSGRSANAGGGGSGGGGSGGGGSEPKSSDKTHTCPPCPA |
| | | | PEAAGGPSVFLFPPKPKDTLMISRTPEVTCVVVSVSHEDPEVKFNWYVDGV |
| | | | EVHNAKTKPREEQYNSTYRVVSVLTVLHQDWLNGKEYKCKVSNKALPAPI |
| | | | EKTISKAKGQPREPQVYVLPPSRDELTKNQVSLLCLVKGFYPSDIAVEWES |
| | | | NGQPENNYLTWPPVLDSDGSFFLYSKLTVDKSRWQQGNVFSCSVMHEAL |
| | | | HNHYTQKSLSLSPG |
| 53 | 21452 | Full AA | QVQLVESGGGVVQPGRSLRLSCAASGFTFSSYGMHWVRQAPGKGLEWVA |
| | | | FIRYDGSNKYYADSVKGRFTISRDNSKNTLYLQMNSLRAEDTAVYYCKTH |
| | | | GSHDNWGQGTMVTVSSGGGGSGGGGSGGGGSQSVLTQPPSVSGAPGQRV |
| | | | TISCSGSRSNIGSNTVKWYQQLPGTAPKLLIYYNDQRPSGVPDRFSGSKSGT |
| | | | SASLAITGLQAEDEADYYCQSYDRYTHPALLFGTGTKVTVLGGGGSGGGG |
| | | | SGGGGSMSGRSANAGGGGSGGGGSGGGGSGGGGSRNLPVATPDPGMFPC |
| | | | LHHSQNLLRAVSNMLQKARQTLEFYPCTSEEIDHEDITKDKTSTVEACLPLE |
| | | | LTKNESCLNSRETSFITNGSCLASRKTSFMMALCLSSIYEDLKMYQVEFKT |
| | | | MNAKLLMDPKRQIFLDQNMLAVIDELMQALNFNSETVPQKSSLEEPDFYK |
| | | | TKIKLCILLHAFRIRAVTIDRVMSYLNASGGGGSGGGGSEPKSSDKTHTCPP |
| | | | CPAPEAAGGPSVFLFPPKPKDTLMISRTPEVTCVVVSVSHEDPEVKFNWYV |
| | | | DGVEVHNAKTKPREEQYNSTYRVVSVLTVLHQDWLNGKEYKCKVSNKAL |
| | | | PAPIEKTISKAKGQPREPQVYVYPPSRDELTKNQVSLTCLVKGFYPSDIAVE |
| | | | WESNGQPENNYKTTPPVLDSDGSFALVSKLTVDKSRWQQGNVFSCSVMH |
| | | | EALHNHYTQKSLSLSPG |
| 54 | 22203 | Full AA | QVQLVESGGGVVQPGRSLRLSCAASGFTFSSAGMHWVRQAPGKGLEWVA |
| | | | FIRYDGSNKYYADSVKGRFTISRDNSKNTLYLQMNSLRAEDTAVYYCKTH |
| | | | GSHDNWGQGTMVTVSSGGGGSGGGGSGGGGSQSVLTQPPSVSGAPGQRV |
| | | | TISCSGSRSNIGSNTVKWYQQLPGTAPKLLIYYNDQRPSGVPDRFSGSKSGT |
| | | | SASLAITGLQAEDEADYYCQSYDRYTHPALLFGTGTKVTVLAAEPKSSDKT |
| | | | HTCPPCPAPEAAGGPSVFLFPPKPKDTLMISRTPEVTCVVVSVSHEDPEVKF |
| | | | NWYVDGVEVHNAKTKPREEQYNSTYRVVSVLTVLHQDWLNGKEYKCKV |
| | | | SNKALPAPIEKTISKAKGQPREPQVYVLPPSRDELTKNQVSLLCLVKGFYPS |
| | | | DIAVEWESNGQPENNYLTWPPVLDSDGSFFLYSKLTVDKSRWQQGNVFSC |
| | | | SVMHEALHNHYTQKSLSLSPG |
| 55 | 22206 | Full AA | QVQLVESGGGVVQPGRSLRLSCAASGVTFSSYGMHWVRQAPGKGLEWVA |
| | | | FIRYDGSNKYYADSVKGRFTISRDNSKNTLYLQMNSLRAEDTAVYYCKTH |
| | | | GSHDNWGQGTMVTVSSGGGGSGGGGSGGGGSQSVLTQPPSVSGAPGQRV |
| | | | TISCSGSRSNIGSNTVKWYQQLPGTAPKLLIYYNDQRPSGVPDRFSGSKSGT |
| | | | SASLAITGLQAEDEADYYCQSYDRYTHPALLFGTGTKVTVLAAEPKSSDKT |
| | | | HTCPPCPAPEAAGGPSVFLFPPKPKDTLMISRTPEVTCVVVSVSHEDPEVKF |
| | | | NWYVDGVEVHNAKTKPREEQYNSTYRVVSVLTVLHQDWLNGKEYKCKV |
| | | | SNKALPAPIEKTISKAKGQPREPQVYVLPPSRDELTKNQVSLLCLVKGFYPS |
| | | | DIAVEWESNGQPENNYLTWPPVLDSDGSFFLYSKLTVDKSRWQQGNVFSC |
| | | | SVMHEALHNHYTQKSLSLSPG |
| 56 | 22207 | Full AA | QVQLVESGGGVVQPGRSLRLSCAASGFTFSSYGMHWVRQAPGKGLEWVA |
| | | | FIRVDGSNKYYADSVKGRFTISRDNSKNTLYLQMNSLRAEDTAVYYCKTH |
| | | | GSHDNWGQGTMVTVSSGGGGSGGGGSGGGGSQSVLTQPPSVSGAPGQRV |
| | | | TISCSGSRSNIGSNTVKWYQQLPGTAPKLLIYYNDQRPSGVPDRFSGSKSGT |
| | | | SASLAITGLQAEDEADYYCQSYDRYTHPALLFGTGTKVTVLAAEPKSSDKT |
| | | | HTCPPCPAPEAAGGPSVFLFPPKPKDTLMISRTPEVTCVVVSVSHEDPEVKF |
| | | | NWYVDGVEVHNAKTKPREEQYNSTYRVVSVLTVLHQDWLNGKEYKCKV |
| | | | SNKALPAPIEKTISKAKGQPREPQVYVLPPSRDELTKNQVSLLCLVKGFYPS |
| | | | DIAVEWESNGQPENNYLTWPPVLDSDGSFFLYSKLTVDKSRWQQGNVFSC |
| | | | SVMHEALHNHYTQKSLSLSPG |
| 57 | 22208 | Full AA | QVQLVESGGGVVQPGRSLRLSCAASGFTFSSYGMHWVRQAPGKGLEWVA |
| | | | FIEYDGSNKYYADSVKGRFTISRDNSKNTLYLQMNSLRAEDTAVYYCKTH |
| | | | GSHDNWGQGTMVTVSSGGGGSGGGGSGGGGSQSVLTQPPSVSGAPGQRV |
| | | | TISCSGSRSNIGSNTVKWYQQLPGTAPKLLIYYNDQRPSGVPDRFSGSKSGT |
| | | | SASLAITGLQAEDEADYYCQSYDRYTHPALLFGTGTKVTVLAAEPKSSDKT |
| | | | HTCPPCPAPEAAGGPSVFLFPPKPKDTLMISRTPEVTCVVVSVSHEDPEVKF |
| | | | NWYVDGVEVHNAKTKPREEQYNSTYRVVSVLTVLHQDWLNGKEYKCKV |
| | | | SNKALPAPIEKTISKAKGQPREPQVYVLPPSRDELTKNQVSLLCLVKGFYPS |
| | | | DIAVEWESNGQPENNYLTWPPVLDSDGSFFLYSKLTVDKSRWQQGNVFSC |
| | | | SVMHEALHNHYTQKSLSLSPG |
| 58 | 22209 | Full AA | QVQLVESGGGVVQPGRSLRLSCAASGFTFSSYGMHWVRQAPGKGLEWVA |
| | | | FIEVDGSNKYYADSVKGRFTISRDNSKNTLYLQMNSLRAEDTAVYYCKTH |
| | | | GSHDNWGQGTMVTVSSGGGGSGGGGSGGGGSQSVLTQPPSVSGAPGQRV |
| | | | TISCSGSRSNIGSNTVKWYQQLPGTAPKLLIYYNDQRPSGVPDRFSGSKSGT |
| | | | SASLAITGLQAEDEADYYCQSYDRYTHPALLFGTGTKVTVLAAEPKSSDKT |
| | | | HTCPPCPAPEAAGGPSVFLFPPKPKDTLMISRTPEVTCVVVSVSHEDPEVKF |
| | | | NWYVDGVEVHNAKTKPREEQYNSTYRVVSVLTVLHQDWLNGKEYKCKV |
| | | | SNKALPAPIEKTISKAKGQPREPQVYVLPPSRDELTKNQVSLLCLVKGFYPS |
| | | | DIAVEWESNGQPENNYLTWPPVLDSDGSFFLYSKLTVDKSRWQQGNVFSC |
| | | | SVMHEALHNHYTQKSLSLSPG |
| 59 | 22211 | Full AA | QVQLVESGGGVVQPGRSLRLSCAASGFTFSSYGMHWVRQAPGKGLEWVA |
| | | | FIRYDGSNKYYADSVKGRFTISRDNSKNTLYLQMNSLRAEDTAVYYCKTD |
| | | | GSHDNWGQGTMVTVSSGGGGSGGGGSGGGGSQSVLTQPPSVSGAPGQRV |
| | | | TISCSGSRSNIGSNTVKWYQQLPGTAPKLLIYYNDQRPSGVPDRFSGSKSGT |
| | | | SASLAITGLQAEDEADYYCQSYDRYTHPALLFGTGTKVTVLAAEPKSSDKT |
| | | | HTCPPCPAPEAAGGPSVFLFPPKPKDTLMISRTPEVTCVVVSVSHEDPEVKF |
| | | | NWYVDGVEVHNAKTKPREEQYNSTYRVVSVLTVLHQDWLNGKEYKCKV |
| | | | SNKALPAPIEKTISKAKGQPREPQVYVLPPSRDELTKNQVSLLCLVKGFYPS |
| | | | DIAVEWESNGQPENNYLTWPPVLDSDGSFFLYSKLTVDKSRWQQGNVFSC |
| | | | SVMHEALHNHYTQKSLSLSPG |
| 60 | 22212 | Full AA | QVQLVESGGGVVQPGRSLRLSCAASGFTFSSYGMHWVRQAPGKGLEWVA |
| | | | FIRYDGSNKYYADSVKGRFTISRDNSKNTLYLQMNSLRAEDTAVYYCKTH |
| | | | TSHDNWGQGTMVTVSSGGGGSGGGGSGGGGSQSVLTQPPSVSGAPGQRV |
| | | | TISCSGSRSNIGSNTVKWYQQLPGTAPKLLIYYNDQRPSGVPDRFSGSKSGT |
| | | | SASLAITGLQAEDEADYYCQSYDRYTHPALLFGTGTKVTVLAAEPKSSDKT |
| | | | HTCPPCPAPEAAGGPSVFLFPPKPKDTLMISRTPEVTCVVVSVSHEDPEVKF |
| | | | NWYVDGVEVHNAKTKPREEQYNSTYRVVSVLTVLHQDWLNGKEYKCKV |
| | | | SNKALPAPIEKTISKAKGQPREPQVYVLPPSRDELTKNQVSLLCLVKGFYPS |
| | | | DIAVEWESNGQPENNYLTWPPVLDSDGSFFLYSKLTVDKSRWQQGNVFSC |
| | | | SVMHEALHNHYTQKSLSLSPG |
| 61 | 22214 | Full AA | QVQLVESGGGVVQPGRSLRLSCAASGFTFSSYGMHWVRQAPGKGLEWVA |
| | | | FIRYDGSNKYYADSVKGRFTISRDNSKNTLYLQMNSLRAEDTAVYYCKTH |
| | | | GSADNWGQGTMVTVSSGGGGSGGGGSGGGGSQSVLTQPPSVSGAPGQRV |
| | | | TISCSGSRSNIGSNTVKWYQQLPGTAPKLLIYYNDQRPSGVPDRFSGSKSGT |
| | | | SASLAITGLQAEDEADYYCQSYDRYTHPALLFGTGTKVTVLAAEPKSSDKT |
| | | | HTCPPCPAPEAAGGPSVFLFPPKPKDTLMISRTPEVTCVVVSVSHEDPEVKF |
| | | | NWYVDGVEVHNAKTKPREEQYNSTYRVVSVLTVLHQDWLNGKEYKCKV |
| | | | SNKALPAPIEKTISKAKGQPREPQVYVLPPSRDELTKNQVSLLCLVKGFYPS |
| | | | DIAVEWESNGQPENNYLTWPPVLDSDGSFFLYSKLTVDKSRWQQGNVFSC |
| | | | SVMHEALHNHYTQKSLSLSPG |
| 62 | 22279 | Full AA | EPKSSDKTHTCPPCPAPEAAGGPSVFLFPPKPKDTLMISRTPEVTCVVVSVS |
| | | | HEDPEVKFNWYVDGVEVHNAKTKPREEQYNSTYRVVSVLTVLHQDWLN |
| | | | GKEYKCKVSNKALPAPIEKTISKAKGQPREPQVYVYPPSRDELTKNQVSLT |
| | | | CLVKGFYPSDIAVEWESNGQPENNYKTTPPVLDSDGSFALVSKLTVDKSR |
| | | | WQQGNVFSCSVMHEALHNHYTQKSLSLSPGGSADGGIWELKKDVYVVEL |
| | | | DWYPDAPGEMVVLTCDTPEEDGITWTLDQSSEVLGSGKTLTIQVKEFGDA |
| | | | GQYTCHKGGEVLSHSLLLLHKKEDGIWSTDILKDQKEPKNKTFLRCEAKN |
| | | | YSGRFTCWWLTTISTDLTFSVKSSRGSSDPQGVTCGAATLSAERVRGDNKE |
| | | | YEYSVECQEDSACPAAEESLPIEVMVDAVHKLKYENYTSSFFIRDIIKPDPP |
| | | | KNLQLKPLKNSRQVEVSWEYPDTWSTPHSYFSLTFCVQVQGKSKREKKDR |
| | | | VFTDKTSATVICRKNASISVRAQDRYYSSSWSEWASVPCSGGGGSGGGGS |
| | | | GGGGSNLPVATPDPGMFPCLHHSQNLLRAVSNMLQKARQTLEFYPCTSEEI |
| | | | DHEDITKDKTSTVEACLPLELTKNESCLNSRETSFITNGSCLASRKTSFMMA |
| | | | LCLSSIYEDLKMYQVEFKTMNAKLLMDPKRQIFLDQNMLAVIDELMQALN |
| | | | FNSETVPQKSSLEEPDFYKTKIKLCILLHAFRIRAVTIDRVMSYLNAS |
| 63 | 22289 | Full AA | EPKSSDKTHTCPPCPAPEAAGGPSVFLFPPKPKDTLMISRTPEVTCVVVSVS |
| | | | HEDPEVKFNWYVDGVEVHNAKTKPREEQYNSTYRVVSVLTVLHQDWLN |
| | | | GKEYKCKVSNKALPAPIEKTISKAKGQPREPQVYVYPPSRDELTKNQVSLT |
| | | | CLVKGFYPSDIAVEWESNGQPENNYKTTPPVLDSDGSFALVSKLTVDKSR |
| | | | WQQGNVFSCSVMHEALHNHYTQKSLSLSPGGSADGGIWELKKDVYVVEL |
| | | | DWYPDAPGEMVVLTCDTPEEDGITWTLDQSSEVLGSGKTLTIQVKEFGDA |
| | | | GQYTCHKGGEVLSHSLLLLHKKEDGIWSTDILKDQKEPKNKTFLRCEAKN |
| | | | YSGRFTCWWLTTISTDLTFSVKSSRGSSDPQGVTCGAATLSAERVRGDNKE |
| | | | YEYSVECQEDSACPAAEESLPIEVMVDAVHKLKYENYTSSFFIRDIIKPDPP |
| | | | KNLQLKPLKNSRQVEVSWEYPDTWSTPHSYFSLTFCVQVRDDSEDRVFTD |
| | | | KTSATVICRKNASISVRAQDRYYSSSWSEWASVPCSGGGGSGGGGSGGGG |
| | | | SNLPVATPDPGMFPCLHHSQNLLRAVSNMLQKARQTLEFYPCTSEEIDHED |
| | | | ITKDKTSTVEACLPLELTKNESCLNSRETSFITNGSCLASRKTSFMMALCLSS |
| | | | IYEDLKMYQVEFKTMNAKLLMDPKRQIFLDQNMLAVIDELMQALNFNSET |
| | | | VPQKSSLEEPDFYKTKIKLCILLHAFRIRAVTIDRVMSYLNAS |
| 64 | 22290 | Full AA | EPKSSDKTHTCPPCPAPEAAGGPSVFLFPPKPKDTLMISRTPEVTCVVVSVS |
| | | | HEDPEVKFNWYVDGVEVHNAKTKPREEQYNSTYRVVSVLTVLHQDWLN |
| | | | GKEYKCKVSNKALPAPIEKTISKAKGQPREPQVYVYPPSRDELTKNQVSLT |
| | | | CLVKGFYPSDIAVEWESNGQPENNYKTTPPVLDSDGSFALVSKLTVDKSR |
| | | | WQQGNVFSCSVMHEALHNHYTQKSLSLSPGGSADGGIWELKKDVYVVEL |
| | | | DWYPDAPGEMVVLTCDTPEEDGITWTLDQSSEVLGSGKTLTIQVKEFGDA |
| | | | GQYTCHKGGEVLSHSLLLLHKKEDGIWSTDILKDQKEPKNKTFLRCEAKN |
| | | | YSGRFTCWWLTTISTDLTFSVKSSRGSSDPQGVTCGAATLSAERVRGDNKE |
| | | | YEYSVECQEDSACPAAEESLPIEVMVDAVHKLKYENYTSSFFIRDIIKPDPP |
| | | | KNLQLKPLKNSRQVEVSWEYPDTWSTPHSYFSLTFCVQVQGSQEKKDRVF |
| | | | TDKTSATVICRKNASISVRAQDRYYSSSWSEWASVPCSGGGGSGGGGSGG |
| | | | GGSNLPVATPDPGMFPCLHHSQNLLRAVSNMLQKARQTLEFYPCTSEEIDH |
| | | | EDITKDKTSTVEACLPLELTKNESCLNSRETSFITNGSCLASRKTSFMMALC |
| | | | LSSIYEDLKMYQVEFKTMNAKLLMDPKRQIFLDQNMLAVIDELMQALNFN |
| | | | SETVPQKSSLEEPDFYKTKIKLCILLHAFRIRAVTIDRVMSYLNAS |
| 65 | 22291 | Full AA | EPKSSDKTHTCPPCPAPEAAGGPSVFLFPPKPKDTLMISRTPEVTCVVVSVS |
| | | | HEDPEVKFNWYVDGVEVHNAKTKPREEQYNSTYRVVSVLTVLHQDWLN |
| | | | GKEYKCKVSNKALPAPIEKTISKAKGQPREPQVYVYPPSRDELTKNQVSLT |
| | | | CLVKGFYPSDIAVEWESNGQPENNYKTTPPVLDSDGSFALVSKLTVDKSR |
| | | | WQQGNVFSCSVMHEALHNHYTQKSLSLSPGGSADGGIWELKKDVYVVEL |
| | | | DWYPDAPGEMVVLTCDTPEEDGITWTLDQSSEVLGSGKTLTIQVKEFGDA |
| | | | GQYTCHKGGEVLSHSLLLLHKKEDGIWSTDILKDQKEPKNKTFLRCEAKN |
| | | | YSGRFTCWWLTTISTDLTFSVKSSRGSSDPQGVTCGAATLSAERVRGDNKE |
| | | | YEYSVECQEDSACPAAEESLPIEVMVDAVHKLKYENYTSSFFIRDIIKPDPP |
| | | | KNLQLKPLKNSRQVEVSWEYPDTWSTPHSYFSLTFCVQVQGESKQEKKDR |
| | | | VFTDKTSATVICRKNASISVRAQDRYYSSSWSEWASVPCSGGGGSGGGGS |
| | | | GGGGSNLPVATPDPGMFPCLHHSQNLLRAVSNMLQKARQTLEFYPCTSEEI |
| | | | DHEDITKDKTSTVEACLPLELTKNESCLNSRETSFITNGSCLASRKTSFMMA |
| | | | LCLSSIYEDLKMYQVEFKTMNAKLLMDPKRQIFLDQNMLAVIDELMQALN |
| | | | FNSETVPQKSSLEEPDFYKTKIKLCILLHAFRIRAVTIDRVMSYLNAS |
| 66 | 22292 | Full AA | EPKSSDKTHTCPPCPAPEAAGGPSVFLFPPKPKDTLMISRTPEVTCVVVSVS |
| | | | HEDPEVKFNWYVDGVEVHNAKTKPREEQYNSTYRVVSVLTVLHQDWLN |
| | | | GKEYKCKVSNKALPAPIEKTISKAKGQPREPQVYVYPPSRDELTKNQVSLT |
| | | | CLVKGFYPSDIAVEWESNGQPENNYKTTPPVLDSDGSFALVSKLTVDKSR |
| | | | WQQGNVFSCSVMHEALHNHYTQKSLSLSPGGSADGGIWELKKDVYVVEL |
| | | | DWYPDAPGEMVVLTCDTPEEDGITWTLDQSSEVLGSGKTLTIQVKEFGDA |
| | | | GQYTCHKGGEVLSHSLLLLHKKEDGIWSTDILKDQKEPKNKTFLRCEAKN |
| | | | YSGRFTCWWLTTISTDLTFSVKSSRGSSDPQGVTCGAATLSAERVRGDNKE |
| | | | YEYSVECQEDSACPAAEESLPIEVMVDAVHKLKYENYTSSFFIRDIIKPDPP |
| | | | KNLQLKPLKNSRQVEVSWEYPDTWSTPHSYFSLTFCVQVQGEKKDRVFTD |
| | | | KTSATVICRKNASISVRAQDRYYSSSWSEWASVPCSGGGGSGGGGSGGGG |
| | | | SNLPVATPDPGMFPCLHHSQNLLRAVSNMLQKARQTLEFYPCTSEEIDHED |
| | | | ITKDKTSTVEACLPLELTKNESCLNSRETSFITNGSCLASRKTSFMMALCLSS |
| | | | IYEDLKMYQVEFKTMNAKLLMDPKRQIFLDQNMLAVIDELMQALNFNSET |
| | | | VPQKSSLEEPDFYKTKIKLCILLHAFRIRAVTIDRVMSYLNAS |
| 67 | 22293 | Full AA | EPKSSDKTHTCPPCPAPEAAGGPSVFLFPPKPKDTLMISRTPEVTCVVVSVS |
| | | | HEDPEVKFNWYVDGVEVHNAKTKPREEQYNSTYRVVSVLTVLHQDWLN |
| | | | GKEYKCKVSNKALPAPIEKTISKAKGQPREPQVYVYPPSRDELTKNQVSLT |
| | | | CLVKGFYPSDIAVEWESNGQPENNYKTTPPVLDSDGSFALVSKLTVDKSR |
| | | | WQQGNVFSCSVMHEALHNHYTQKSLSLSPGGSADGGIWELKKDVYVVEL |
| | | | DWYPDAPGEMVVLTCDTPEEDGITWTLDQSSEVLGSGKTLTIQVKEFGDA |
| | | | GQYTCHKGGEVLSHSLLLLHKKEDGIWSTDILKDQKEPKNKTFLRCEAKN |
| | | | YSGRFTCWWLTTISTDLTFSVKSSRGSSDPQGVTCGAATLSAERVRGDNKE |
| | | | YEYSVECQEDSACPAAEESLPIEVMVDAVHKLKYENYTSSFFIRDIIKPDPP |
| | | | KNLQLKPLKNSRQVEVSWEYPDTWSTPHSYFSLTFCVQVQDQTDDRVFTD |
| | | | KTSATVICRKNASISVRAQDRYYSSSWSEWASVPCSGGGGSGGGGSGGGG |
| | | | SNLPVATPDPGMFPCLHHSQNLLRAVSNMLQKARQTLEFYPCTSEEIDHED |
| | | | ITKDKTSTVEACLPLELTKNESCLNSRETSFITNGSCLASRKTSFMMALCLSS |
| | | | IYEDLKMYQVEFKTMNAKLLMDPKRQIFLDQNMLAVIDELMQALNFNSET |
| | | | VPQKSSLEEPDFYKTKIKLCILLHAFRIRAVTIDRVMSYLNAS |
| 68 | 22294 | Full AA | EPKSSDKTHTCPPCPAPEAAGGPSVFLFPPKPKDTLMISRTPEVTCVVVSVS |
| | | | HEDPEVKFNWYVDGVEVHNAKTKPREEQYNSTYRVVSVLTVLHQDWLN |
| | | | GKEYKCKVSNKALPAPIEKTISKAKGQPREPQVYVYPPSRDELTKNQVSLT |
| | | | CLVKGFYPSDIAVEWESNGQPENNYKTTPPVLDSDGSFALVSKLTVDKSR |
| | | | WQQGNVFSCSVMHEALHNHYTQKSLSLSPGGSADGGIWELKKDVYVVEL |
| | | | DWYPDAPGEMVVLTCDTPEEDGITWTLDQSSEVLGSGKTLTIQVKEFGDA |
| | | | GQYTCHKGGEVLSHSLLLLHKKEDGIWSTDILKDQKEPKNKTFLRCEAKN |
| | | | YSGRFTCWWLTTISTDLTFSVKSSRGSSDPQGVTCGAATLSAERVRGDNKE |
| | | | YEYSVECQEDSACPAAEESLPIEVMVDAVHKLKYENYTSSFFIRDIIKPDPP |
| | | | KNLQLKPLKNSRQVEVSWEYPDTWSTPHSYFSLTFCVQVQDDSEDRVFTD |
| | | | KTSATVICRKNASISVRAQDRYYSSSWSEWASVPCSGGGGSGGGGSGGGG |
| | | | SNLPVATPDPGMFPCLHHSQNLLRAVSNMLQKARQTLEFYPCTSEEIDHED |
| | | | ITKDKTSTVEACLPLELTKNESCLNSRETSFITNGSCLASRKTSFMMALCLSS |
| | | | IYEDLKMYQVEFKTMNAKLLMDPKRQIFLDQNMLAVIDELMQALNFNSET |
| | | | VPQKSSLEEPDFYKTKIKLCILLHAFRIRAVTIDRVMSYLNAS |
| 69 | 22295 | Full AA | EPKSSDKTHTCPPCPAPEAAGGPSVFLFPPKPKDTLMISRTPEVTCVVVSVS |
| | | | HEDPEVKFNWYVDGVEVHNAKTKPREEQYNSTYRVVSVLTVLHQDWLN |
| | | | GKEYKCKVSNKALPAPIEKTISKAKGQPREPQVYVYPPSRDELTKNQVSLT |
| | | | CLVKGFYPSDIAVEWESNGQPENNYKTTPPVLDSDGSFALVSKLTVDKSR |
| | | | WQQGNVFSCSVMHEALHNHYTQKSLSLSPGGSADGGIWELKKDVYVVEL |
| | | | DWYPDAPGEMVVLTCDTPEEDGITWTLDQSSEVLGSGKTLTIQVKEFGDA |
| | | | GQYTCHKGGEVLSHSLLLLHKKEDGIWSTDILKDQKEPKNKTFLRCEAKN |
| | | | YSGRFTCWWLTTISTDLTFSVKSSRGSSDPQGVTCGAATLSAERVRGDNKE |
| | | | YEYSVECQEDSACPAAEESLPIEVMVDAVHKLKYENYTSSFFIRDIIKPDPP |
| | | | KNLQLKPLKNSRQVEVSWEYPDTWSTPHSYFSLTFCVQVKDQTEDRVFTD |
| | | | KTSATVICRKNASISVRAQDRYYSSSWSEWASVPCSGGGGSGGGGSGGGG |
| | | | SNLPVATPDPGMFPCLHHSQNLLRAVSNMLQKARQTLEFYPCTSEEIDHED |
| | | | ITKDKTSTVEACLPLELTKNESCLNSRETSFITNGSCLASRKTSFMMALCLSS |
| | | | IYEDLKMYQVEFKTMNAKLLMDPKRQIFLDQNMLAVIDELMQALNFNSET |
| | | | VPQKSSLEEPDFYKTKIKLCILLHAFRIRAVTIDRVMSYLNAS |
| 70 | 22296 | Full AA | EPKSSDKTHTCPPCPAPEAAGGPSVFLFPPKPKDTLMISRTPEVTCVVVSVS |
| | | | HEDPEVKFNWYVDGVEVHNAKTKPREEQYNSTYRVVSVLTVLHQDWLN |
| | | | GKEYKCKVSNKALPAPIEKTISKAKGQPREPQVYVYPPSRDELTKNQVSLT |
| | | | CLVKGFYPSDIAVEWESNGQPENNYKTTPPVLDSDGSFALVSKLTVDKSR |
| | | | WQQGNVFSCSVMHEALHNHYTQKSLSLSPGGSADGGIWELKKDVYVVEL |
| | | | DWYPDAPGEMVVLTCDTPEEDGITWTLDQSSEVLGSGKTLTIQVKEFGDA |
| | | | GQYTCHKGGEVLSHSLLLLHKKEDGIWSTDILKDQKEPKNKTFLRCEAKN |
| | | | YSGRFTCWWLTTISTDLTFSVKSSRGSSDPQGVTCGAATLSAERVRGDNKE |
| | | | YEYSVECQEDSACPAAEESLPIEVMVDAVHKLKYENYTSSFFIRDIIKPDPP |
| | | | KNLQLKPLKNSRQVEVSWEYPDTWSTPHSYFSLTFCVQVQGSEKDRVFTD |
| | | | KTSATVICRKNASISVRAQDRYYSSSWSEWASVPCSGGGGSGGGGSGGGG |
| | | | SNLPVATPDPGMFPCLHHSQNLLRAVSNMLQKARQTLEFYPCTSEEIDHED |
| | | | ITKDKTSTVEACLPLELTKNESCLNSRETSFITNGSCLASRKTSFMMALCLSS |
| | | | IYEDLKMYQVEFKTMNAKLLMDPKRQIFLDQNMLAVIDELMQALNFNSET |
| | | | VPQKSSLEEPDFYKTKIKLCILLHAFRIRAVTIDRVMSYLNAS |
| 71 | 22672 | Full AA | EPKSSDKTHTCPPCPAPEAAGGPSVFLFPPKPKDTLMISRTPEVTCVVVSVS |
| | | | HEDPEVKFNWYVDGVEVHNAKTKPREEQYNSTYRVVSVLTVLHQDWLN |
| | | | GKEYKCKVSNKALPAPIEKTISKAKGQPREPQVYVLPPSRDELTKNQVSLL |
| | | | CLVKGFYPSDIAVEWESNGQPENNYLTWPPVLDSDGSFFLYSKLTVDKSR |
| | | | WQQGNVFSCSVMHEALHNHYTQKSLSLSPGGGGGSMSGRSANAGGGGSG |
| | | | GGGSGGGGSGGGGSKIDACKRGDVTVKPSHVILLGSTVNITCSLKPRQGCF |
| | | | HYSRRNKLILYKFDRRINFHHGHSLNSQVTGLPLGTTLFVCKLACINSDEIQI |
| | | | CGAEIFVGVAPEQPQNLSCIQKGEQGTVACTWERGRDTHLYTEYTLQLSGP |
| | | | KNLTWQKQCKDIYCDYLDFGINLTPESPESNFTAKVTAVNSLGSSSSLPSTF |
| | | | TFLDIVRPLPPWDIRIKFQKASVSRCTLYWRDEGLVLLNRLRYRPSNSRLW |
| | | | NMVNVTKAKGRHDLLDLKPFTEYEFQISSKLHLYKGSWSDWSESLRAQTP |
| | | | EEEP |
| 72 | 22735 | Full AA | EPKSSDKTHTCPPCPAPEAAGGPSVFLFPPKPKDTLMISRTPEVTCVVVSVS |
| | | | HEDPEVKFNWYVDGVEVHNAKTKPREEQYNSTYRVVSVLTVLHQDWLN |
| | | | GKEYKCKVSNKALPAPIEKTISKAKGQPREPQVYVLPPSRDELTKNQVSLL |
| | | | CLVKGFYPSDIAVEWESNGQPENNYLTWPPVLDSDGSFFLYSKLTVDKSR |
| | | | WQQGNVFSCSVMHEALHNHYTQKSLSLSPGGGGGSGGGGSMSGRSANAG |
| | | | GGGSGGGGSQVQLVESGGGVVQPGRSLRLSCAASGFTFSSYGMHWVRQA |
| | | | PGKGLEWVAFIRYDGSNKYYADSVKGRFTISRDNSKNTLYLQMNSLRAED |
| | | | TAVYYCKTHGSHDNWGQGTMVTVSSGGGGSMSGRSANAGGGGSGGGGS |
| | | | QSVLTQPPSVSGAPGQRVTISCSGSRSNIGSNTVKWYQQLPGTAPKLLIYYN |
| | | | DQRPSGVPDRFSGSKSGTSASLAITGLQAEDEADYYCQSYDRYTHPALLFG |
| | | | TGTKVTVL |
| 73 | 23360 | Full AA | EPKSSDKTHTCPPCPAPEAAGGPSVFLFPPKPKDTLMISRTPEVTCVVVSVS |
| | | | HEDPEVKFNWYVDGVEVHNAKTKPREEQYNSTYRVVSVLTVLHQDWLN |
| | | | GKEYKCKVSNKALPAPIEKTISKAKGQPREPQVYVLPPSRDELTKNQVSLL |
| | | | CLVKGFYPSDIAVEWESNGQPENNYLTWPPVLDSDGSFFLYSKLTVDKSR |
| | | | WQQGNVFSCSVMHEALHNHYTQKSLSLSPGGGGGSGGGGSMSGRSANAG |
| | | | GGGSGGGGSQSVLTQPPSVSGAPGQRVTISCSGSRSNIGSNTVKWYQQLPG |
| | | | TAPKLLIYYNDQRPSGVPDRFSGSKSGTSASLAITGLQAEDEADYYCQSYD |
| | | | RYTHPALLFGTGTKVTVLGGSGGGSGGGSGGGSGGGSGQVQLVESGGGV |
| | | | VQPGRSLRLSCAASGFTFSSYGMHWVRQAPGKGLEWVAFIRYDGSNKYY |
| | | | ADSVKGRFTISRDNSKNTLYLQMNSLRAEDTAVYYCKTHGSHDNWGQGT |
| | | | MVTVSS |
| 74 | 23361 | Full AA | EPKSSDKTHTCPPCPAPEAAGGPSVFLFPPKPKDTLMISRTPEVTCVVVSVS |
| | | | HEDPEVKFNWYVDGVEVHNAKTKPREEQYNSTYRVVSVLTVLHQDWLN |
| | | | GKEYKCKVSNKALPAPIEKTISKAKGQPREPQVYVLPPSRDELTKNQVSLL |
| | | | CLVKGFYPSDIAVEWESNGQPENNYLTWPPVLDSDGSFFLYSKLTVDKSR |
| | | | WQQGNVFSCSVMHEALHNHYTQKSLSLSPGGGGGSGGGGSMSGRSANAG |
| | | | GGGSGGGGSQSVLTQPPSVSGAPGQRVTISCSGSRSNIGSNTVKWYQQLPG |
| | | | TAPKLLIYYNDQRPSGVPDRFSGSKSGTSASLAITGLQAEDEADYYCQSYD |
| | | | RYTHPALLFGCGTKVTVLGGSGGGSGGGSGGGSGGGSGQVQLVESGGGV |
| | | | VQPGRSLRLSCAASGFTFSSYGMHWVRQAPGKCLEWVAFIRYDGSNKYY |
| | | | ADSVKGRFTISRDNSKNTLYLQMNSLRAEDTAVYYCKTHGSHDNWGQGT |
| | | | MVTVSS |
| 75 | 23363 | Full AA | EPKSSDKTHTCPPCPAPEAAGGPSVFLFPPKPKDTLMISRTPEVTCVVVSVS |
| | | | HEDPEVKFNWYVDGVEVHNAKTKPREEQYNSTYRVVSVLTVLHQDWLN |
| | | | GKEYKCKVSNKALPAPIEKTISKAKGQPREPQVYVLPPSRDELTKNQVSLL |
| | | | CLVKGFYPSDIAVEWESNGQPENNYLTWPPVLDSDGSFFLYSKLTVDKSR |
| | | | WQQGNVFSCSVMHEALHNHYTQKSLSLSPGGGGGSGGGGSMSGRSANAG |
| | | | GGGSGGGGSQVQLVESGGGVVQPGRSLRLSCAASGFTFSSYGMHWVRQA |
| | | | PGKGLEWVAFIRYDGSNKYYADSVKGRFTISRDNSKNTLYLQMNSLRAED |
| | | | TAVYYCKTHGSHDNWGQGTMVTVSSGGSGGGSMSGRSANAGGGSGGGS |
| | | | GGGSGQSVLTQPPSVSGAPGQRVTISCSGSRSNIGSNTVKWYQQLPGTAPK |
| | | | LLIYYNDQRPSGVPDRFSGSKSGTSASLAITGLQAEDEADYYCQSYDRYTH |
| | | | PALLFGTGTKVTVL |
| 76 | 23364 | Full AA | EPKSSDKTHTCPPCPAPEAAGGPSVFLFPPKPKDTLMISRTPEVTCVVVSVS |
| | | | HEDPEVKFNWYVDGVEVHNAKTKPREEQYNSTYRVVSVLTVLHQDWLN |
| | | | GKEYKCKVSNKALPAPIEKTISKAKGQPREPQVYVLPPSRDELTKNQVSLL |
| | | | CLVKGFYPSDIAVEWESNGQPENNYLTWPPVLDSDGSFFLYSKLTVDKSR |
| | | | WQQGNVFSCSVMHEALHNHYTQKSLSLSPGGGGGSGGGGSMSGRSANAG |
| | | | GGGSGGGGSQVQLVESGGGVVQPGRSLRLSCAASGFTFSSAGMHWVRQA |
| | | | PGKGLEWVAFIRYDGSNKYYADSVKGRFTISRDNSKNTLYLQMNSLRAED |
| | | | TAVYYCKTHGSHDNWGQGTMVTVSSGGSGGGSMSGRSANAGGGSGGGS |
| | | | GGGSGQSVLTQPPSVSGAPGQRVTISCSGSRSNIGSNTVKWYQQLPGTAPK |
| | | | LLIYYNDQRPSGVPDRFSGSKSGTSASLAITGLQAEDEADYYCQSYDRYTH |
| | | | PALLFGTGTKVTVL |
| 77 | 23512 | Full AA | EPKSSDKTHTCPPCPAPEAAGGPSVFLFPPKPKDTLMISRTPEVTCVVVSVS |
| | | | HEDPEVKFNWYVDGVEVHNAKTKPREEQYNSTYRVVSVLTVLHQDWLN |
| | | | GKEYKCKVSNKALPAPIEKTISKAKGQPREPQVYVLPPSRDELTKNQVSLL |
| | | | CLVKGFYPSDIAVEWESNGQPENNYLTWPPVLDSDGSFFLYSKLTVDKSR |
| | | | WQQGNVFSCSVMHEALHNHYTQKSLSLSPGGGGGSGGGGSGGGSGGGSG |
| | | | GGGSGGGGSQVQLVESGGGVVQPGRSLRLSCAASGFTFSSYGMHWVRQA |
| | | | PGKGLEWVAFIRYDGSNKYYADSVKGRFTISRDNSKNTLYLQMNSLRAED |
| | | | TAVYYCKTHGSHDNWGQGTMVTVSSGGGGSGGGSGGGSGGGGSGGGGS |
| | | | QSVLTQPPSVSGAPGQRVTISCSGSRSNIGSNTVKWYQQLPGTAPKLLIYYN |
| | | | DQRPSGVPDRFSGSKSGTSASLAITGLQAEDEADYYCQSYDRYTHPALLFG |
| | | | TGTKVTVL |
| 78 | 23513 | Full AA | EPKSSDKTHTCPPCPAPEAAGGPSVFLFPPKPKDTLMISRTPEVTCVVVSVS |
| | | | HEDPEVKFNWYVDGVEVHNAKTKPREEQYNSTYRVVSVLTVLHQDWLN |
| | | | GKEYKCKVSNKALPAPIEKTISKAKGQPREPQVYVLPPSRDELTKNQVSLL |
| | | | CLVKGFYPSDIAVEWESNGQPENNYLTWPPVLDSDGSFFLYSKLTVDKSR |
| | | | WQQGNVFSCSVMHEALHNHYTQKSLSLSPGGGGGSGGGSGGGSGGGGSG |
| | | | GGGSGGGGSGGGGSKIDACKRGDVTVKPSHVILLGSTVNITCSLKPRQGCF |
| | | | HYSRRNKLILYKFDRRINFHHGHSLNSQVTGLPLGTTLFVCKLACINSDEIQI |
| | | | CGAEIFVGVAPEQPQNLSCIQKGEQGTVACTWERGRDTHLYTEYTLQLSGP |
| | | | KNLTWQKQCKDIYCDYLDFGINLTPESPESNFTAKVTAVNSLGSSSSLPSTF |
| | | | TFLDIVRPLPPWDIRIKFQKASVSRCTLYWRDEGLVLLNRLRYRPSNSRLW |
| | | | NMVNVTKAKGRHDLLDLKPFTEYEFQISSKLHLYKGSWSDWSESLRAQTP |
| | | | EEEP |
| 79 | 23710 | Full AA | EPKSSDKTHTCPPCPAPEAAGGPSVFLFPPKPKDTLMISRTPEVTCVVVSVS |
| | | | HEDPEVKFNWYVDGVEVHNAKTKPREEQYNSTYRVVSVLTVLHQDWLN |
| | | | GKEYKCKVSNKALPAPIEKTISKAKGQPREPQVYVYPPSRDELTKNQVSLT |
| | | | CLVKGFYPSDIAVEWESNGQPENNYKTTPPVLDSDGSFALVSKLTVDKSR |
| | | | WQQGNVFSCSVMHEALHNHYTQKSLSLSPGGSADGGMSGRSANAGSADG |
| | | | GIWELKKDVYVVELDWYPDAPGEMVVLTCDTPEEDGITWTLDQSSEVLGS |
| | | | GKTLTIQVKEFGDAGQYTCHKGGEVLSHSLLLLHKKEDGIWSTDILKDQKE |
| | | | PKNKTFLRCEAKNYSGRFTCWWLTTISTDLTFSVKSSRGSSDPQGVTCGAA |
| | | | TLSAERVRGDNKEYEYSVECQEDSACPAAEESLPIEVMVDAVHKLKYENY |
| | | | TSSFFIRDIIKPDPPKNLQLKPLKNSRQVEVSWEYPDTWSTPHSYFSLTFCVQ |
| | | | VQGKSKREKKDRVFTDKTSATVICRKNASISVRAQDRYYSSSWSEWASVP |
| | | | CSGGGGSGGGGSGGGGSNLPVATPDPGMFPCLHHSQNLLRAVSNMLQKA |
| | | | RQTLEFYPCTSEEIDHEDITKDKTSTVEACLPLELTKNESCLNSRETSFITNGS |
| | | | CLASRKTSFMMALCLSSIYEDLKMYQVEFKTMNAKLLMDPKRQIFLDQNM |
| | | | LAVIDELMQALNFNSETVPQKSSLEEPDFYKTKIKLCILLHAFRIRAVTIDRV |
| | | | MSYLNAS |
| 80 | 23711 | Full AA | EPKSSDKTHTCPPCPAPEAAGGPSVFLFPPKPKDTLMISRTPEVTCVVVSVS |
| | | | HEDPEVKFNWYVDGVEVHNAKTKPREEQYNSTYRVVSVLTVLHQDWLN |
| | | | GKEYKCKVSNKALPAPIEKTISKAKGQPREPQVYVYPPSRDELTKNQVSLT |
| | | | CLVKGFYPSDIAVEWESNGQPENNYKTTPPVLDSDGSFALVSKLTVDKSR |
| | | | WQQGNVFSCSVMHEALHNHYTQKSLSLSPGGSADGGMSGRSANAGSADG |
| | | | GIWELKKDVYVVELDWYPDAPGEMVVLTCDTPEEDGITWTLDQSSEVLGS |
| | | | GKTLTIQVKEFGDAGQYTCHKGGEVLSHSLLLLHKKEDGIWSTDILKDQKE |
| | | | PKNKTFLRCEAKNYSGRFTCWWLTTISTDLTFSVKSSRGSSDPQGVTCGAA |
| | | | TLSAERVRGDNKEYEYSVECQEDSACPAAEESLPIEVMVDAVHKLKYENY |
| | | | TSSFFIRDIIKPDPPKNLQLKPLKNSRQVEVSWEYPDTWSTPHSYFSLTFCVQ |
| | | | VQGESKQEKKDRVFTDKTSATVICRKNASISVRAQDRYYSSSWSEWASVP |
| | | | CSGGGGSGGGGSGGGGSNLPVATPDPGMFPCLHHSQNLLRAVSNMLQKA |
| | | | RQTLEFYPCTSEEIDHEDITKDKTSTVEACLPLELTKNESCLNSRETSFITNGS |
| | | | CLASRKTSFMMALCLSSIYEDLKMYQVEFKTMNAKLLMDPKRQIFLDQNM |
| | | | LAVIDELMQALNFNSETVPQKSSLEEPDFYKTKIKLCILLHAFRIRAVTIDRV |
| | | | MSYLNAS |
| 81 | 24228 | Full AA | EPKSSDKTHTCPPCPAPEAAGGPSVFLFPPKPKDTLMISRTPEVTCVVVSVS |
| | | | HEDPEVKFNWYVDGVEVHNAKTKPREEQYNSTYRVVSVLTVLHQDWLN |
| | | | GKEYKCKVSNKALPAPIEKTISKAKGQPREPQVYVYPPSRDELTKNQVSLT |
| | | | CLVKGFYPSDIAVEWESNGQPENNYKTTPPVLDSDGSFALVSKLTVDKSR |
| | | | WQQGNVFSCSVMHEALHNHYTQKSLSLSPGGSADGGIWELKKDVYVVEL |
| | | | DWYPDAPGEMVVLTCDTPEEDGITWTLDQSSEVLGSGKTLTIQVKEFGDA |
| | | | GQYTCHKGGEVLSHSLLLLHKKEDGIWSTDILKDQKEPKNKTFLRCEAKN |
| | | | YSGRFTCWWLTTISTDLTFSVKSSRGSSDPQGVTCGAATLSAERVRGDNKE |
| | | | YEYSVECQEDSACPAAEESLPIEVMVDAVHKLKYENYTSSFFIRDIIKPDPP |
| | | | KNLQLKPLKNSRQVEVSWEYPDTWSTPHSYFSLTFCVQVQGKSKREKKDR |
| | | | VFTDKTSATVICRKNASISVRAQDRYYSSSWSEWASVPCSGGGGSGGGGS |
| | | | GGGGSNLPVATPDPGMFPCLHHSQNLLRAVSNMLQKARQTLEFYPCTSEEI |
| | | | DHEDITKDKTSTVEACLPLELTKNESCLNSRETSFITNGSCLASRKTSFMMA |
| | | | LCLSSIYEDLKMYQVEFKTMNAKLLMDPKRQIFLDQNMLAVIDELMQALN |
| | | | FNSETVPQKSSLEEPDFYKTKIKLCILLHAFRIRAVTIDRVMSYLNASGGGG |
| | | | SMSGRSANAGGGGSGGGGSGGGGSGGGGSEIVMTQSPATLSVSPGERATL |
| | | | SCRASQSISINLHWYQQKPGQAPRLLIYFASQSISGIPARFSGSGSGTEFTLTI |
| | | | SSLQSEDFAVYYCQQSNSFPLTFGGGTKVEIKGGSGGGSGGGSGGGSGGGS |
| | | | GQVQLVQSGAEVKKPGASVKVSCKASGYTFTDYYLHWVRQAPGQGLEW |
| | | | MGWIDPENGDTEYAPKFQGRVTMTTDTSTSTAYMELRSLRSDDTAVYYC |
| | | | NANKELRYFDVWGQGTMVTVSS |
| 82 | 24229 | Full AA | EPKSSDKTHTCPPCPAPEAAGGPSVFLFPPKPKDTLMISRTPEVTCVVVSVS |
| | | | HEDPEVKFNWYVDGVEVHNAKTKPREEQYNSTYRVVSVLTVLHQDWLN |
| | | | GKEYKCKVSNKALPAPIEKTISKAKGQPREPQVYVLPPSRDELTKNQVSLL |
| | | | CLVKGFYPSDIAVEWESNGQPENNYLTWPPVLDSDGSFFLYSKLTVDKSR |
| | | | WQQGNVFSCSVMHEALHNHYTQKSLSLSPGGGGGSGGGGSMSGRSANAG |
| | | | GGGSGGGGSQVQLVESGGGVVQPGRSLRLSCAASGFTFSSYGMHWVRQA |
| | | | PGKGLEWVAFIRYDGSNKYYADSVKGRFTISRDNSKNTLYLQMNSLRAED |
| | | | TAVYYCKTHGSHDNWGQGTMVTVSSGGGGSMSGRSANAGGGGSGGGGS |
| | | | QSVLTQPPSVSGAPGQRVTISCSGSRSNIGSNTVKWYQQLPGTAPKLLIYYN |
| | | | DQRPSGVPDRFSGSKSGTSASLAITGLQAEDEADYYCQSYDRYTHPALLFG |
| | | | TGTKVTVLGGGGSGGGGSGGGGSMSGRSANAGGGGSGGGGSGGGGSEIV |
| | | | MTQSPATLSVSPGERATLSCRASQSISINLHWYQQKPGQAPRLLIYFASQSIS |
| | | | GIPARFSGSGSGTEFTLTISSLQSEDFAVYYCQQSNSFPLTFGGGTKVEIKGG |
| | | | SGGGSGGGSGGGSGGGSGQVQLVQSGAEVKKPGASVKVSCKASGYTFTD |
| | | | YYLHWVRQAPGQGLEWMGWIDPENGDTEYAPKFQGRVTMTTDTSTSTAY |
| | | | MELRSLRSDDTAVYYCNANKELRYFDVWGQGTMVTVSS |
| 83 | 24230 | Full AA | EPKSSDKTHTCPPCPAPEAAGGPSVFLFPPKPKDTLMISRTPEVTCVVVSVS |
| | | | HEDPEVKFNWYVDGVEVHNAKTKPREEQYNSTYRVVSVLTVLHQDWLN |
| | | | GKEYKCKVSNKALPAPIEKTISKAKGQPREPQVYVLPPSRDELTKNQVSLL |
| | | | CLVKGFYPSDIAVEWESNGQPENNYLTWPPVLDSDGSFFLYSKLTVDKSR |
| | | | WQQGNVFSCSVMHEALHNHYTQKSLSLSPGGGGGSGGGGSMSGRSANAG |
| | | | GGGSGGGGSQVQLVESGGGVVQPGRSLRLSCAASGFTFSSYGMHWVRQA |
| | | | PGKGLEWVAFIRYDGSNKYYADSVKGRFTISRDNSKNTLYLQMNSLRAED |
| | | | TAVYYCKTHGSHDNWGQGTMVTVSSGGGGSMSGRSANAGGGGSGGGGS |
| | | | QSVLTQPPSVSGAPGQRVTISCSGSRSNIGSNTVKWYQQLPGTAPKLLIYYN |
| | | | DQRPSGVPDRFSGSKSGTSASLAITGLQAEDEADYYCQSYDRYTHPALLFG |
| | | | TGTKVTVLGGGGSGGGGSGGGGSMSGRSANAGGGGSGGGGSGGGGSQV |
| | | | QLVQSGAEVKKPGASVKVSCKASGYTFTDYYLHWVRQAPGQGLEWMGW |
| | | | IDPENGDTEYAPKFQGRVTMTTDTSTSTAYMELRSLRSDDTAVYYCNANK |
| | | | ELRYFDVWGQGTMVTVSSGGSGGGSGGGSGGGSGGGSGEIVMTQSPATLS |
| | | | VSPGERATLSCRASQSISINLHWYQQKPGQAPRLLIYFASQSISGIPARFSGS |
| | | | GSGTEFTLTISSLQSEDFAVYYCQQSNSFPLTFGGGTKVEIK |
| 84 | 24231 | Full AA | EPKSSDKTHTCPPCPAPEAAGGPSVFLFPPKPKDTLMISRTPEVTCVVVSVS |
| | | | HEDPEVKFNWYVDGVEVHNAKTKPREEQYNSTYRVVSVLTVLHQDWLN |
| | | | GKEYKCKVSNKALPAPIEKTISKAKGQPREPQVYVYPPSRDELTKNQVSLT |
| | | | CLVKGFYPSDIAVEWESNGQPENNYKTTPPVLDSDGSFALVSKLTVDKSR |
| | | | WQQGNVFSCSVMHEALHNHYTQKSLSLSPGGSADGGIWELKKDVYVVEL |
| | | | DWYPDAPGEMVVLTCDTPEEDGITWTLDQSSEVLGSGKTLTIQVKEFGDA |
| | | | GQYTCHKGGEVLSHSLLLLHKKEDGIWSTDILKDQKEPKNKTFLRCEAKN |
| | | | YSGRFTCWWLTTISTDLTFSVKSSRGSSDPQGVTCGAATLSAERVRGDNKE |
| | | | YEYSVECQEDSACPAAEESLPIEVMVDAVHKLKYENYTSSFFIRDIIKPDPP |
| | | | KNLQLKPLKNSRQVEVSWEYPDTWSTPHSYFSLTFCVQVQGKSKREKKDR |
| | | | VFTDKTSATVICRKNASISVRAQDRYYSSSWSEWASVPCSGGGGSGGGGS |
| | | | GGGGSNLPVATPDPGMFPCLHHSQNLLRAVSNMLQKARQTLEFYPCTSEEI |
| | | | DHEDITKDKTSTVEACLPLELTKNESCLNSRETSFITNGSCLASRKTSFMMA |
| | | | LCLSSIYEDLKMYQVEFKTMNAKLLMDPKRQIFLDQNMLAVIDELMQALN |
| | | | FNSETVPQKSSLEEPDFYKTKIKLCILLHAFRIRAVTIDRVMSYLNASGGGG |
| | | | SMSGRSANAGGGGSGGGGSGGGGSGGGGSGGGGSKIDACKRGDVTVKPS |
| | | | HVILLGSTVNITCSLKPRQGCFHYSRRNKLILYKFDRRINFHHGHSLNSQVT |
| | | | GLPLGTTLFVCKLACINSDEIQICGAEIFVGVAPEQPQNLSCIQKGEQGTVAC |
| | | | TWERGRDTHLYTEYTLQLSGPKNLTWQKQCKDIYCDYLDFGINLTPESPES |
| | | | NFTAKVTAVNSLGSSSSLPSTFTFLDIVRPLPPWDIRIKFQKASVSRCTLYWR |
| | | | DEGLVLLNRLRYRPSNSRLWNMVNVTKAKGRHDLLDLKPFTEYEFQISSK |
| | | | LHLYKGSWSDWSESLRAQTPEEEP |
| 85 | 24232 | Full AA | EPKSSDKTHTCPPCPAPEAAGGPSVFLFPPKPKDTLMISRTPEVTCVVVSVS |
| | | | HEDPEVKFNWYVDGVEVHNAKTKPREEQYNSTYRVVSVLTVLHQDWLN |
| | | | GKEYKCKVSNKALPAPIEKTISKAKGQPREPQVYVLPPSRDELTKNQVSLL |
| | | | CLVKGFYPSDIAVEWESNGQPENNYLTWPPVLDSDGSFFLYSKLTVDKSR |
| | | | WQQGNVFSCSVMHEALHNHYTQKSLSLSPGGGGGSGGGGSGGGGSMSGR |
| | | | SANAGGGGSGGGGSGGGGSCRTSECCFQDPPYPDADSGSASGPRDLRCYRI |
| | | | SSDRYECSWQYEGPTAGVSHFLRCCLSSGRCCYFAAGSATRLQFSDQAGV |
| | | | SVLYTVTLWVESWARNQTEKSPEVTLQLYNSVKYEPPLGDIKVSKLAGQL |
| | | | RMEWETPDNQVGAEVQFRHRTPSSPWKLGDCGPQDDDTESCLCPLEMNV |
| | | | AQEFQLRRRQLGSQGSSWSKWSSPVCVPPENPPQPQ |
| 86 | 24233 | Full AA | EPKSSDKTHTCPPCPAPEAAGGPSVFLFPPKPKDTLMISRTPEVTCVVVSVS |
| | | | HEDPEVKFNWYVDGVEVHNAKTKPREEQYNSTYRVVSVLTVLHQDWLN |
| | | | GKEYKCKVSNKALPAPIEKTISKAKGQPREPQVYVLPPSRDELTKNQVSLL |
| | | | CLVKGFYPSDIAVEWESNGQPENNYLTWPPVLDSDGSFFLYSKLTVDKSR |
| | | | WQQGNVFSCSVMHEALHNHYTQKSLSLSPGGGGGSMSGRSANAGGGGSG |
| | | | GGGSGGGGSGGGGSKIDACKRGDVTVKPSHVILLGSTVNITCSLKPRQGCF |
| | | | HYSRRNKLILYKFDRRINFHHGHSLNSQVTGLPLGTTLFVCKLACINSDEIQI |
| | | | CGAEIFVGVAPGGGGSGGGGSGGGGSMSGRSANAGGGGSGGGGSGGGGS |
| | | | CRTSECCFQDPPYPDADSGSASGPRDLRCYRISSDRYECSWQYEGPTAGVS |
| | | | HFLRCCLSSGRCCYFAAGSATRLQFSDQAGVSVLYTVTLWVESWARNQTE |
| | | | KSPEVTLQLYNSVKYEPPLGDIKVSKLAGQLRMEWETPDNQVGAEVQFRH |
| | | | RTPSSPWKLGDCGPQDDDTESCLCPLEMNVAQEFQLRRRQLGSQGSSWSK |
| | | | WSSPVCVPPENPPQPQ |
| 87 | 24235 | Full AA | KIDACKRGDVTVKPSHVILLGSTVNITCSLKPRQGCFHYSRRNKLILYKFDR |
| | | | RINFHHGHSLNSQVTGLPLGTTLFVCKLACINSDEIQICGAEIFVGVAPGGG |
| | | | GSGGGGSMSGRSANAGGGGSRNLPVATPDPGMFPCLHHSQNLLRAVSNM |
| | | | LQKARQTLEFYPCTSEEIDHEDITKDKTSTVEACLPLELTKNESCLNSRETSF |
| | | | ITNGSCLASRKTSFMMALCLSSIYEDLKMYQVEFKTMNAKLLMDPKRQIFL |
| | | | DQNMLAVIDELMQALNFNSETVPQKSSLEEPDFYKTKIKLCILLHAFRIRAV |
| | | | TIDRVMSYLNASGGGGSGGGGSEPKSSDKTHTCPPCPAPEAAGGPSVFLFPP |
| | | | KPKDTLMISRTPEVTCVVVSVSHEDPEVKFNWYVDGVEVHNAKTKPREEQ |
| | | | YNSTYRVVSVLTVLHQDWLNGKEYKCKVSNKALPAPIEKTISKAKGQPRE |
| | | | PQVYVYPPSRDELTKNQVSLTCLVKGFYPSDIAVEWESNGQPENNYKTTPP |
| | | | VLDSDGSFALVSKLTVDKSRWQQGNVFSCSVMHEALHNHYTQKSLSLSPG |
| 88 | 24236 | Full AA | CRTSECCFQDPPYPDADSGSASGPRDLRCYRISSDRYECSWQYEGPTAGVS |
| | | | HFLRCCLSSGRCCYFAAGSATRLQFSDQAGVSVLYTVTLWVESWARNQTE |
| | | | KSPEVTLQLYNSVKYEPPLGDIKVSKLAGQLRMEWETPDNQVGAEVQFRH |
| | | | RTPSSPWKLGDCGPQDDDTESCLCPLEMNVAQEFQLRRRQLGSQGSSWSK |
| | | | WSSPVCVPPENPPQPQGGGGSGGGGSGGGGSGGGGSMSGRSANAEPKSSD |
| | | | KTHTCPPCPAPEAAGGPSVFLFPPKPKDTLMISRTPEVTCVVVSVSHEDPEV |
| | | | KFNWYVDGVEVHNAKTKPREEQYNSTYRVVSVLTVLHQDWLNGKEYKC |
| | | | KVSNKALPAPIEKTISKAKGQPREPQVYVLPPSRDELTKNQVSLLCLVKGFY |
| | | | PSDIAVEWESNGQPENNYLTWPPVLDSDGSFFLYSKLTVDKSRWQQGNVF |
| | | | SCSVMHEALHNHYTQKSLSLSPG |
| 89 | 24246 | Full AA | EPKSSDKTHTCPPCPAPEAAGGPSVFLFPPKPKDTLMISRTPEVTCVVVSVS |
| | | | HEDPEVKFNWYVDGVEVHNAKTKPREEQYNSTYRVVSVLTVLHQDWLN |
| | | | GKEYKCKVSNKALPAPIEKTISKAKGQPREPQVYVYPPSRDELTKNQVSLT |
| | | | CLVKGFYPSDIAVEWESNGQPENNYKTTPPVLDSDGSFALVSKLTVDKSR |
| | | | WQQGNVFSCSVMHEALHNHYTQKSLSLSPGGGGGSMSGRSANAGGGGSG |
| | | | GGGSGGGGSGGGGSKIDACKRGDVTVKPSHVILLGSTVNITCSLKPRQGCF |
| | | | HYSRRNKLILYKFDRRINFHHGHSLNSQVTGLPLGTTLFVCKLACINSDEIQI |
| | | | CGAEIFVGVAPGGGGSGGGGSMSGRSANAGGGGSRNLPVATPDPGMFPCL |
| | | | HHSQNLLRAVSNMLQKARQTLEFYPCTSEEIDHEDITKDKTSTVEACLPLEL |
| | | | TKNESCLNSRETSFITNGSCLASRKTSFMMALCLSSIYEDLKMYQVEFKTM |
| | | | NAKLLMDPKRQIFLDQNMLAVIDELMQALNFNSETVPQKSSLEEPDFYKTK |
| | | | IKLCILLHAFRIRAVTIDRVMSYLNAS |
| 90 | 12153 | Full nt | GAGCCAAAGAGCTCCGACAAGACCCACACATGCCCCCCTTGTCCGGCG |
| | | | CCAGAGGCAGCAGGAGGACCAAGCGTGTTCCTGTTTCCACCCAAGCCC |
| | | | AAAGACACCCTGATGATTAGCCGAACCCCTGAAGTCACATGCGTGGTC |
| | | | GTGTCCGTGTCTCACGAGGACCCAGAAGTCAAGTTCAACTGGTACGTGG |
| | | | ATGGCGTCGAGGTGCATAATGCCAAGACAAAACCCCGGGAGGAACAGT |
| | | | ACAACAGCACCTATAGAGTCGTGTCCGTCCTGACAGTGCTGCACCAGGA |
| | | | TTGGCTGAACGGCAAGGAATATAAGTGCAAAGTGTCCAATAAGGCCCT |
| | | | GCCCGCTCCTATCGAGAAAACCATTTCTAAGGCAAAAGGCCAGCCTCGC |
| | | | GAACCACAGGTCTACGTGCTGCCTCCATCCCGGGACGAGCTGACAAAG |
| | | | AACCAGGTCTCTCTGCTGTGCCTGGTGAAAGGCTTCTATCCATCAGATA |
| | | | TTGCTGTGGAGTGGGAAAGCAATGGGCAGCCCGAGAACAATTACCTGA |
| | | | CTTGGCCCCCTGTGCTGGACTCTGATGGGAGTTTCTTTCTGTATTCTAAG |
| | | | CTGACCGTGGATAAAAGTAGGTGGCAGCAGGGAAATGTCTTTAGTTGTT |
| | | | CAGTGATGCATGAAGCCCTGCATAACCACTACACCCAGAAAAGCCTGT |
| | | | CCCTGTCCCCCGGA |
| 91 | 12155 | Full nt | GAGCCAAAGAGCTCCGACAAGACCCACACATGCCCCCCTTGTCCGGCG |
| | | | CCAGAGGCTGCAGGAGGACCAAGCGTGTTCCTGTTTCCACCCAAGCCTA |
| | | | AAGACACACTGATGATTTCCCGAACCCCCGAAGTCACATGCGTGGTCGT |
| | | | GTCTGTGAGTCACGAGGACCCTGAAGTCAAGTTCAACTGGTACGTGGAT |
| | | | GGCGTCGAGGTGCATAATGCCAAGACTAAACCTAGGGAGGAACAGTAC |
| | | | AACTCAACCTATCGCGTCGTGAGCGTCCTGACAGTGCTGCACCAGGATT |
| | | | GGCTGAACGGCAAAGAATATAAGTGCAAAGTGAGCAATAAGGCCCTGC |
| | | | CCGCTCCTATCGAGAAAACCATTTCCAAGGCTAAAGGGCAGCCTCGCG |
| | | | AACCACAGGTCTACGTGTATCCTCCAAGCCGGGACGAGCTGACAAAGA |
| | | | ACCAGGTCTCCCTGACTTGTCTGGTGAAAGGGTTTTACCCTAGTGATAT |
| | | | CGCTGTGGAGTGGGAATCAAATGGACAGCCAGAGAACAATTATAAGAC |
| | | | TACCCCCCCTGTGCTGGACAGTGATGGGTCATTCGCACTGGTCTCCAAG |
| | | | CTGACAGTGGACAAATCTCGGTGGCAGCAGGGAAATGTCTTTTCATGTA |
| | | | GCGTGATGCATGAAGCACTGCACAACCATTACACCCAGAAGTCACTGTC |
| | | | ACTGTCACCAGGA |
| 92 | 12933 | Full nt | GACATCCAGATGACACAGTCTCCTAGCTCCCTGTCCGCCTCTGTGGGCG |
| | | | ATAGAGTGACCATCACATGCAGCGCCTCTAGCTCCGTGTCCTACATGCA |
| | | | CTGGTATCAGCAGAAGAGCGGCAAGGCCCCAAAGCTGCTGATCTACGA |
| | | | CACCAGCAAGCTGGCCTCCGGAGTGCCATCTAGGTTCAGCGGCTCCGGC |
| | | | TCTGGCACCGACTTTACCCTGACAATCTCTAGCCTGCAGCCTGAGGATT |
| | | | TCGCCACATACTATTGTCAGCAGTGGTCCGGCTATCCACTGACCTTTGG |
| | | | CCAGGGCACAAAGCTGGAGATCAAGCGCACAGTGGCGGCGCCCAGTGT |
| | | | CTTCATTTTTCCCCCTAGCGACGAACAGCTGAAGTCTGGGACAGCCAGT |
| | | | GTGGTCTGTCTGCTGAACAACTTCTACCCTAGAGAGGCTAAAGTGCAGT |
| | | | GGAAGGTCGATAACGCACTGCAGTCCGGAAATTCTCAGGAGAGTGTGA |
| | | | CTGAACAGGACTCAAAAGATAGCACCTATTCCCTGTCAAGCACACTGAC |
| | | | TCTGAGCAAGGCCGACTACGAGAAGCATAAAGTGTATGCTTGTGAAGT |
| | | | CACCCACCAGGGGCTGAGTTCACCAGTCACAAAATCATTCAACAGAGG |
| | | | GGAGTGC |
| 93 | 17572 | Full nt | CAAGTGGGAGCCTGCCCTAGCGGCAAGAAGGCCCGCGAGATCGACGAG |
| | | | TCCCTGATCTTCTACAAGAAGTGGGAGCTGGAGGCATGCGTGGACGCC |
| | | | GCCCTGCTGGCCACACAGATGGATAGGGTGAACGCCATCCCTTTTACCT |
| | | | ATGAGCAGCTGGATGTGCTGAAGCACAAGCTGCCACAGGGACAGGGAG |
| | | | GAGGAGGCTCCGGAGGAGGCGGCAACTCTCCACTGAGCGGGCGGAGCG |
| | | | ACAATCACCAGGGACAGTCTGGACAGGGAGGACAGGTGCAGCTGGTGC |
| | | | AGAGCGGAGCCGAGGTGAAGAAGCCTGGGGCCAGCGTGAAGGTGTCTT |
| | | | GCAAGGCCTCTGGCTACAGCTTCACAGGCTATACCATGAATTGGGTGCG |
| | | | GCAGGCCCCAGGACAGGGACTGGAGTGGATGGGCCTGATCACACCCTA |
| | | | CAACGGGGCCAGCTCCTATAATCAGAAGTTTCGGGGCAAGGCCACCAT |
| | | | GACAGTGGACACCAGCACATCCACCGTGTACATGGAGCTGTCTAGCCTG |
| | | | AGAAGCGAGGATACCGCCGTGTACTATTGTGCCAGAGGCGGCTACGAC |
| | | | GGCAGAGGCTTTGATTATTGGGGCCAGGGCACACTGGTGACCGTGTCCT |
| | | | CTGCTAGCACTAAGGGGCCTTCCGTGTTTCCACTGGCTCCCTCTAGTAA |
| | | | ATCCACCTCTGGAGGCACAGCTGCACTGGGATGTCTGGTGAAGGATTAC |
| | | | TTCCCTGAACCAGTCACAGTGAGTTGGAACTCAGGGGCTCTGACAAGTG |
| | | | GAGTCCATACTTTTCCCGCAGTGCTGCAGTCAAGCGGACTGTACTCCCT |
| | | | GTCCTCTGTGGTCACCGTGCCTAGTTCAAGCCTGGGCACCCAGACATAT |
| | | | ATCTGCAACGTGAATCACAAGCCATCAAATACAAAAGTCGACAAGAAA |
| | | | GTGGAGCCCAAGAGCTGTGATAAAACTCATACCTGCCCACCTTGTCCGG |
| | | | CGCCAGAGGCAGCAGGAGGACCAAGCGTGTTCCTGTTTCCACCCAAGC |
| | | | CCAAAGACACCCTGATGATTAGCCGAACCCCTGAAGTCACATGCGTGGT |
| | | | CGTGTCCGTGTCTCACGAGGACCCAGAAGTCAAGTTCAACTGGTACGTG |
| | | | GATGGCGTCGAGGTGCATAATGCCAAGACAAAACCCCGGGAGGAACAG |
| | | | TACAACAGCACCTATAGAGTCGTGTCCGTCCTGACAGTGCTGCACCAGG |
| | | | ATTGGCTGAACGGCAAGGAATATAAGTGCAAAGTGTCCAATAAGGCCC |
| | | | TGCCCGCTCCTATCGAGAAAACCATTTCTAAGGCAAAAGGCCAGCCTCG |
| | | | CGAACCACAGGTCTACGTGCTGCCTCCATCCCGGGACGAGCTGACAAA |
| | | | GAACCAGGTCTCTCTGCTGTGCCTGGTGAAAGGCTTCTATCCATCAGAT |
| | | | ATTGCTGTGGAGTGGGAAAGCAATGGGCAGCCCGAGAACAATTACCTG |
| | | | ACTTGGCCCCCTGTGCTGGACTCTGATGGGAGTTTCTTTCTGTATTCTAA |
| | | | GCTGACCGTGGATAAAAGTAGGTGGCAGCAGGGAAATGTCTTTAGTTG |
| | | | TTCAGTGATGCATGAAGCCCTGCATAACCACTACACCCAGAAAAGCCTG |
| | | | TCCCTGTCCCCCGGA |
| 94 | 17573 | Full nt | CAAGTGGGAGCCTGCCCTAGCGGCAAGAAGGCCCGCGAGATCGACGAG |
| | | | TCCCTGATCTTCTACAAGAAGTGGGAGCTGGAGGCATGCGTGGACGCC |
| | | | GCCCTGCTGGCCACACAGATGGATAGGGTGAACGCCATCCCTTTTACCT |
| | | | ATGAGCAGCTGGATGTGCTGAAGCACAAGCTGCCACAGGGACAGGGAG |
| | | | GAGGAGGCTCCGGAGGAGGCGGCAACTCTCCAACCAGCGGGCGGAGCG |
| | | | CAAATCCCCAGGGACAGTCTGGACAGGGAGGACAGGTGCAGCTGGTGC |
| | | | AGAGCGGAGCCGAGGTGAAGAAGCCTGGGGCCAGCGTGAAGGTGTCTT |
| | | | GCAAGGCCTCTGGCTACAGCTTCACAGGCTATACCATGAATTGGGTGCG |
| | | | GCAGGCCCCAGGACAGGGACTGGAGTGGATGGGCCTGATCACACCCTA |
| | | | CAACGGGGCCAGCTCCTATAATCAGAAGTTTCGGGGCAAGGCCACCAT |
| | | | GACAGTGGACACCAGCACATCCACCGTGTACATGGAGCTGTCTAGCCTG |
| | | | AGAAGCGAGGATACCGCCGTGTACTATTGTGCCAGAGGCGGCTACGAC |
| | | | GGCAGAGGCTTTGATTATTGGGGCCAGGGCACACTGGTGACCGTGTCCT |
| | | | CTGCTAGCACTAAGGGGCCTTCCGTGTTTCCACTGGCTCCCTCTAGTAA |
| | | | ATCCACCTCTGGAGGCACAGCTGCACTGGGATGTCTGGTGAAGGATTAC |
| | | | TTCCCTGAACCAGTCACAGTGAGTTGGAACTCAGGGGCTCTGACAAGTG |
| | | | GAGTCCATACTTTTCCCGCAGTGCTGCAGTCAAGCGGACTGTACTCCCT |
| | | | GTCCTCTGTGGTCACCGTGCCTAGTTCAAGCCTGGGCACCCAGACATAT |
| | | | ATCTGCAACGTGAATCACAAGCCATCAAATACAAAAGTCGACAAGAAA |
| | | | GTGGAGCCCAAGAGCTGTGATAAAACTCATACCTGCCCACCTTGTCCGG |
| | | | CGCCAGAGGCAGCAGGAGGACCAAGCGTGTTCCTGTTTCCACCCAAGC |
| | | | CCAAAGACACCCTGATGATTAGCCGAACCCCTGAAGTCACATGCGTGGT |
| | | | CGTGTCCGTGTCTCACGAGGACCCAGAAGTCAAGTTCAACTGGTACGTG |
| | | | GATGGCGTCGAGGTGCATAATGCCAAGACAAAACCCCGGGAGGAACAG |
| | | | TACAACAGCACCTATAGAGTCGTGTCCGTCCTGACAGTGCTGCACCAGG |
| | | | ATTGGCTGAACGGCAAGGAATATAAGTGCAAAGTGTCCAATAAGGCCC |
| | | | TGCCCGCTCCTATCGAGAAAACCATTTCTAAGGCAAAAGGCCAGCCTCG |
| | | | CGAACCACAGGTCTACGTGCTGCCTCCATCCCGGGACGAGCTGACAAA |
| | | | GAACCAGGTCTCTCTGCTGTGCCTGGTGAAAGGCTTCTATCCATCAGAT |
| | | | ATTGCTGTGGAGTGGGAAAGCAATGGGCAGCCCGAGAACAATTACCTG |
| | | | ACTTGGCCCCCTGTGCTGGACTCTGATGGGAGTTTCTTTCTGTATTCTAA |
| | | | GCTGACCGTGGATAAAAGTAGGTGGCAGCAGGGAAATGTCTTTAGTTG |
| | | | TTCAGTGATGCATGAAGCCCTGCATAACCACTACACCCAGAAAAGCCTG |
| | | | TCCCTGTCCCCCGGA |
| 95 | 17577 | Full nt | CAAGTGGGAGCCTGCCCTAGCGGCAAGAAGGCCCGCGAGATCGACGAG |
| | | | TCCCTGATCTTCTACAAGAAGTGGGAGCTGGAGGCATGCGTGGACGCC |
| | | | GCCCTGCTGGCCACACAGATGGATAGGGTGAACGCCATCCCTTTTACCT |
| | | | ATGAGCAGCTGGATGTGCTGAAGCACAAGCTGCCACAGGGACAGGGAG |
| | | | GAGGAGGCTCCGGAGGAGGCGGCAACTCTCCAGGGAGCGGGCGGAGC |
| | | | GCACAGGTGCAGGGACAGTCTGGACAGGGAGGACAGGTGCAGCTGGTG |
| | | | CAGAGCGGAGCCGAGGTGAAGAAGCCTGGGGCCAGCGTGAAGGTGTCT |
| | | | TGCAAGGCCTCTGGCTACAGCTTCACAGGCTATACCATGAATTGGGTGC |
| | | | GGCAGGCCCCAGGACAGGGACTGGAGTGGATGGGCCTGATCACACCCT |
| | | | ACAACGGGGCCAGCTCCTATAATCAGAAGTTTCGGGGCAAGGCCACCA |
| | | | TGACAGTGGACACCAGCACATCCACCGTGTACATGGAGCTGTCTAGCCT |
| | | | GAGAAGCGAGGATACCGCCGTGTACTATTGTGCCAGAGGCGGCTACGA |
| | | | CGGCAGAGGCTTTGATTATTGGGGCCAGGGCACACTGGTGACCGTGTCC |
| | | | TCTGCTAGCACTAAGGGGCCTTCCGTGTTTCCACTGGCTCCCTCTAGTAA |
| | | | ATCCACCTCTGGAGGCACAGCTGCACTGGGATGTCTGGTGAAGGATTAC |
| | | | TTCCCTGAACCAGTCACAGTGAGTTGGAACTCAGGGGCTCTGACAAGTG |
| | | | GAGTCCATACTTTTCCCGCAGTGCTGCAGTCAAGCGGACTGTACTCCCT |
| | | | GTCCTCTGTGGTCACCGTGCCTAGTTCAAGCCTGGGCACCCAGACATAT |
| | | | ATCTGCAACGTGAATCACAAGCCATCAAATACAAAAGTCGACAAGAAA |
| | | | GTGGAGCCCAAGAGCTGTGATAAAACTCATACCTGCCCACCTTGTCCGG |
| | | | CGCCAGAGGCAGCAGGAGGACCAAGCGTGTTCCTGTTTCCACCCAAGC |
| | | | CCAAAGACACCCTGATGATTAGCCGAACCCCTGAAGTCACATGCGTGGT |
| | | | CGTGTCCGTGTCTCACGAGGACCCAGAAGTCAAGTTCAACTGGTACGTG |
| | | | GATGGCGTCGAGGTGCATAATGCCAAGACAAAACCCCGGGAGGAACAG |
| | | | TACAACAGCACCTATAGAGTCGTGTCCGTCCTGACAGTGCTGCACCAGG |
| | | | ATTGGCTGAACGGCAAGGAATATAAGTGCAAAGTGTCCAATAAGGCCC |
| | | | TGCCCGCTCCTATCGAGAAAACCATTTCTAAGGCAAAAGGCCAGCCTCG |
| | | | CGAACCACAGGTCTACGTGCTGCCTCCATCCCGGGACGAGCTGACAAA |
| | | | GAACCAGGTCTCTCTGCTGTGCCTGGTGAAAGGCTTCTATCCATCAGAT |
| | | | ATTGCTGTGGAGTGGGAAAGCAATGGGCAGCCCGAGAACAATTACCTG |
| | | | ACTTGGCCCCCTGTGCTGGACTCTGATGGGAGTTTCTTTCTGTATTCTAA |
| | | | GCTGACCGTGGATAAAAGTAGGTGGCAGCAGGGAAATGTCTTTAGTTG |
| | | | TTCAGTGATGCATGAAGCCCTGCATAACCACTACACCCAGAAAAGCCTG |
| | | | TCCCTGTCCCCCGGA |
| 96 | 17578 | Full nt | CAAGTGGGAGCCTGCCCTAGCGGCAAGAAGGCCCGCGAGATCGACGAG |
| | | | TCCCTGATCTTCTACAAGAAGTGGGAGCTGGAGGCATGCGTGGACGCC |
| | | | GCCCTGCTGGCCACACAGATGGATAGGGTGAACGCCATCCCTTTTACCT |
| | | | ATGAGCAGCTGGATGTGCTGAAGCACAAGCTGCCACAGGGACAGGGAG |
| | | | GAGGAGGCTCCGGAGGAGGCGGCAACTCTCCAGGGAGCAGCCGGAAC |
| | | | GCAGACGTGCAGGGACAGTCTGGACAGGGAGGACAGGTGCAGCTGGTG |
| | | | CAGAGCGGAGCCGAGGTGAAGAAGCCTGGGGCCAGCGTGAAGGTGTCT |
| | | | TGCAAGGCCTCTGGCTACAGCTTCACAGGCTATACCATGAATTGGGTGC |
| | | | GGCAGGCCCCAGGACAGGGACTGGAGTGGATGGGCCTGATCACACCCT |
| | | | ACAACGGGGCCAGCTCCTATAATCAGAAGTTTCGGGGCAAGGCCACCA |
| | | | TGACAGTGGACACCAGCACATCCACCGTGTACATGGAGCTGTCTAGCCT |
| | | | GAGAAGCGAGGATACCGCCGTGTACTATTGTGCCAGAGGCGGCTACGA |
| | | | CGGCAGAGGCTTTGATTATTGGGGCCAGGGCACACTGGTGACCGTGTCC |
| | | | TCTGCTAGCACTAAGGGGCCTTCCGTGTTTCCACTGGCTCCCTCTAGTAA |
| | | | ATCCACCTCTGGAGGCACAGCTGCACTGGGATGTCTGGTGAAGGATTAC |
| | | | TTCCCTGAACCAGTCACAGTGAGTTGGAACTCAGGGGCTCTGACAAGTG |
| | | | GAGTCCATACTTTTCCCGCAGTGCTGCAGTCAAGCGGACTGTACTCCCT |
| | | | GTCCTCTGTGGTCACCGTGCCTAGTTCAAGCCTGGGCACCCAGACATAT |
| | | | ATCTGCAACGTGAATCACAAGCCATCAAATACAAAAGTCGACAAGAAA |
| | | | GTGGAGCCCAAGAGCTGTGATAAAACTCATACCTGCCCACCTTGTCCGG |
| | | | CGCCAGAGGCAGCAGGAGGACCAAGCGTGTTCCTGTTTCCACCCAAGC |
| | | | CCAAAGACACCCTGATGATTAGCCGAACCCCTGAAGTCACATGCGTGGT |
| | | | CGTGTCCGTGTCTCACGAGGACCCAGAAGTCAAGTTCAACTGGTACGTG |
| | | | GATGGCGTCGAGGTGCATAATGCCAAGACAAAACCCCGGGAGGAACAG |
| | | | TACAACAGCACCTATAGAGTCGTGTCCGTCCTGACAGTGCTGCACCAGG |
| | | | ATTGGCTGAACGGCAAGGAATATAAGTGCAAAGTGTCCAATAAGGCCC |
| | | | TGCCCGCTCCTATCGAGAAAACCATTTCTAAGGCAAAAGGCCAGCCTCG |
| | | | CGAACCACAGGTCTACGTGCTGCCTCCATCCCGGGACGAGCTGACAAA |
| | | | GAACCAGGTCTCTCTGCTGTGCCTGGTGAAAGGCTTCTATCCATCAGAT |
| | | | ATTGCTGTGGAGTGGGAAAGCAATGGGCAGCCCGAGAACAATTACCTG |
| | | | ACTTGGCCCCCTGTGCTGGACTCTGATGGGAGTTTCTTTCTGTATTCTAA |
| | | | GCTGACCGTGGATAAAAGTAGGTGGCAGCAGGGAAATGTCTTTAGTTG |
| | | | TTCAGTGATGCATGAAGCCCTGCATAACCACTACACCCAGAAAAGCCTG |
| | | | TCCCTGTCCCCCGGA |
| 97 | 17580 | Full nt | CAAGTGGGAGCCTGCCCTAGCGGCAAGAAGGCCCGCGAGATCGACGAG |
| | | | TCCCTGATCTTCTACAAGAAGTGGGAGCTGGAGGCATGCGTGGACGCC |
| | | | GCCCTGCTGGCCACACAGATGGATAGGGTGAACGCCATCCCTTTTACCT |
| | | | ATGAGCAGCTGGATGTGCTGAAGCACAAGCTGCCACAGGGACAGGGAG |
| | | | GAGGAGGCTCCGGAGGAGGCGGCAACTCTCCAGGGACCGCCCGGAGCG |
| | | | ACAATGTGCAGGGACAGTCTGGACAGGGAGGACAGGTGCAGCTGGTGC |
| | | | AGAGCGGAGCCGAGGTGAAGAAGCCTGGGGCCAGCGTGAAGGTGTCTT |
| | | | GCAAGGCCTCTGGCTACAGCTTCACAGGCTATACCATGAATTGGGTGCG |
| | | | GCAGGCCCCAGGACAGGGACTGGAGTGGATGGGCCTGATCACACCCTA |
| | | | CAACGGGGCCAGCTCCTATAATCAGAAGTTTCGGGGCAAGGCCACCAT |
| | | | GACAGTGGACACCAGCACATCCACCGTGTACATGGAGCTGTCTAGCCTG |
| | | | AGAAGCGAGGATACCGCCGTGTACTATTGTGCCAGAGGCGGCTACGAC |
| | | | GGCAGAGGCTTTGATTATTGGGGCCAGGGCACACTGGTGACCGTGTCCT |
| | | | CTGCTAGCACTAAGGGGCCTTCCGTGTTTCCACTGGCTCCCTCTAGTAA |
| | | | ATCCACCTCTGGAGGCACAGCTGCACTGGGATGTCTGGTGAAGGATTAC |
| | | | TTCCCTGAACCAGTCACAGTGAGTTGGAACTCAGGGGCTCTGACAAGTG |
| | | | GAGTCCATACTTTTCCCGCAGTGCTGCAGTCAAGCGGACTGTACTCCCT |
| | | | GTCCTCTGTGGTCACCGTGCCTAGTTCAAGCCTGGGCACCCAGACATAT |
| | | | ATCTGCAACGTGAATCACAAGCCATCAAATACAAAAGTCGACAAGAAA |
| | | | GTGGAGCCCAAGAGCTGTGATAAAACTCATACCTGCCCACCTTGTCCGG |
| | | | CGCCAGAGGCAGCAGGAGGACCAAGCGTGTTCCTGTTTCCACCCAAGC |
| | | | CCAAAGACACCCTGATGATTAGCCGAACCCCTGAAGTCACATGCGTGGT |
| | | | CGTGTCCGTGTCTCACGAGGACCCAGAAGTCAAGTTCAACTGGTACGTG |
| | | | GATGGCGTCGAGGTGCATAATGCCAAGACAAAACCCCGGGAGGAACAG |
| | | | TACAACAGCACCTATAGAGTCGTGTCCGTCCTGACAGTGCTGCACCAGG |
| | | | ATTGGCTGAACGGCAAGGAATATAAGTGCAAAGTGTCCAATAAGGCCC |
| | | | TGCCCGCTCCTATCGAGAAAACCATTTCTAAGGCAAAAGGCCAGCCTCG |
| | | | CGAACCACAGGTCTACGTGCTGCCTCCATCCCGGGACGAGCTGACAAA |
| | | | GAACCAGGTCTCTCTGCTGTGCCTGGTGAAAGGCTTCTATCCATCAGAT |
| | | | ATTGCTGTGGAGTGGGAAAGCAATGGGCAGCCCGAGAACAATTACCTG |
| | | | ACTTGGCCCCCTGTGCTGGACTCTGATGGGAGTTTCTTTCTGTATTCTAA |
| | | | GCTGACCGTGGATAAAAGTAGGTGGCAGCAGGGAAATGTCTTTAGTTG |
| | | | TTCAGTGATGCATGAAGCCCTGCATAACCACTACACCCAGAAAAGCCTG |
| | | | TCCCTGTCCCCCGGA |
| 98 | 17584 | Full nt | CAAGTGGGAGCCTGCCCTAGCGGCAAGAAGGCCCGCGAGATCGACGAG |
| | | | TCCCTGATCTTCTACAAGAAGTGGGAGCTGGAGGCATGCGTGGACGCC |
| | | | GCCCTGCTGGCCACACAGATGGATAGGGTGAACGCCATCCCTTTTACCT |
| | | | ATGAGCAGCTGGATGTGCTGAAGCACAAGCTGCCACAGGGACAGGGAG |
| | | | GAGGAGGCTCCGGAGGAGGCGGCAACTCTCCAGGGGGCGGGCGGGTG |
| | | | AACAATGTGCAGGGACAGTCTGGACAGGGAGGACAGGTGCAGCTGGTG |
| | | | CAGAGCGGAGCCGAGGTGAAGAAGCCTGGGGCCAGCGTGAAGGTGTCT |
| | | | TGCAAGGCCTCTGGCTACAGCTTCACAGGCTATACCATGAATTGGGTGC |
| | | | GGCAGGCCCCAGGACAGGGACTGGAGTGGATGGGCCTGATCACACCCT |
| | | | ACAACGGGGCCAGCTCCTATAATCAGAAGTTTCGGGGCAAGGCCACCA |
| | | | TGACAGTGGACACCAGCACATCCACCGTGTACATGGAGCTGTCTAGCCT |
| | | | GAGAAGCGAGGATACCGCCGTGTACTATTGTGCCAGAGGCGGCTACGA |
| | | | CGGCAGAGGCTTTGATTATTGGGGCCAGGGCACACTGGTGACCGTGTCC |
| | | | TCTGCTAGCACTAAGGGGCCTTCCGTGTTTCCACTGGCTCCCTCTAGTAA |
| | | | ATCCACCTCTGGAGGCACAGCTGCACTGGGATGTCTGGTGAAGGATTAC |
| | | | TTCCCTGAACCAGTCACAGTGAGTTGGAACTCAGGGGCTCTGACAAGTG |
| | | | GAGTCCATACTTTTCCCGCAGTGCTGCAGTCAAGCGGACTGTACTCCCT |
| | | | GTCCTCTGTGGTCACCGTGCCTAGTTCAAGCCTGGGCACCCAGACATAT |
| | | | ATCTGCAACGTGAATCACAAGCCATCAAATACAAAAGTCGACAAGAAA |
| | | | GTGGAGCCCAAGAGCTGTGATAAAACTCATACCTGCCCACCTTGTCCGG |
| | | | CGCCAGAGGCAGCAGGAGGACCAAGCGTGTTCCTGTTTCCACCCAAGC |
| | | | CCAAAGACACCCTGATGATTAGCCGAACCCCTGAAGTCACATGCGTGGT |
| | | | CGTGTCCGTGTCTCACGAGGACCCAGAAGTCAAGTTCAACTGGTACGTG |
| | | | GATGGCGTCGAGGTGCATAATGCCAAGACAAAACCCCGGGAGGAACAG |
| | | | TACAACAGCACCTATAGAGTCGTGTCCGTCCTGACAGTGCTGCACCAGG |
| | | | ATTGGCTGAACGGCAAGGAATATAAGTGCAAAGTGTCCAATAAGGCCC |
| | | | TGCCCGCTCCTATCGAGAAAACCATTTCTAAGGCAAAAGGCCAGCCTCG |
| | | | CGAACCACAGGTCTACGTGCTGCCTCCATCCCGGGACGAGCTGACAAA |
| | | | GAACCAGGTCTCTCTGCTGTGCCTGGTGAAAGGCTTCTATCCATCAGAT |
| | | | ATTGCTGTGGAGTGGGAAAGCAATGGGCAGCCCGAGAACAATTACCTG |
| | | | ACTTGGCCCCCTGTGCTGGACTCTGATGGGAGTTTCTTTCTGTATTCTAA |
| | | | GCTGACCGTGGATAAAAGTAGGTGGCAGCAGGGAAATGTCTTTAGTTG |
| | | | TTCAGTGATGCATGAAGCCCTGCATAACCACTACACCCAGAAAAGCCTG |
| | | | TCCCTGTCCCCCGGA |
| 99 | 17586 | Full nt | CAAGTGGGAGCCTGCCCTTCTGGCAAGAAGGCCCGCGAGATCGACGAG |
| | | | AGCCTGATCTTCTACAAGAAGTGGGAGCTGGAGGCATGCGTGGACGCC |
| | | | GCCCTGCTGGCCACACAGATGGATAGGGTGAACGCCATCCCTTTTACCT |
| | | | ATGAGCAGCTGGATGTGCTGAAGCACAAGCTGCCACAGGGACAGGGAG |
| | | | GAGGAGGCAGCGGCGGAGGAGGCAATTCTCCAATGAGCGCCCGCATCC |
| | | | TGCAGGTGCAGGGACAGTCCGGACAGGGAGGACAGGTGCAGCTGGTGC |
| | | | AGTCTGGAGCCGAGGTGAAGAAGCCTGGGGCCAGCGTGAAGGTGTCCT |
| | | | GCAAGGCCTCCGGCTACTCTTTCACAGGCTATACCATGAACTGGGTGCG |
| | | | GCAGGCCCCAGGACAGGGACTGGAGTGGATGGGCCTGATCACACCCTA |
| | | | CAACGGGGCCAGCTCCTATAATCAGAAGTTTCGGGGCAAGGCCACCAT |
| | | | GACAGTGGACACCAGCACATCCACCGTGTACATGGAGCTGTCTAGCCTG |
| | | | AGATCCGAGGATACCGCCGTGTACTATTGTGCCAGAGGCGGCTACGAC |
| | | | GGCAGAGGCTTTGATTATTGGGGCCAGGGCACACTGGTGACCGTGTCCT |
| | | | CTGCTAGCACTAAGGGGCCTTCCGTGTTTCCACTGGCTCCCTCTAGTAA |
| | | | ATCCACCTCTGGAGGCACAGCTGCACTGGGATGTCTGGTGAAGGATTAC |
| | | | TTCCCTGAACCAGTCACAGTGAGTTGGAACTCAGGGGCTCTGACAAGTG |
| | | | GAGTCCATACTTTTCCCGCAGTGCTGCAGTCAAGCGGACTGTACTCCCT |
| | | | GTCCTCTGTGGTCACCGTGCCTAGTTCAAGCCTGGGCACCCAGACATAT |
| | | | ATCTGCAACGTGAATCACAAGCCATCAAATACAAAAGTCGACAAGAAA |
| | | | GTGGAGCCCAAGAGCTGTGATAAAACTCATACCTGCCCACCTTGTCCGG |
| | | | CGCCAGAGGCAGCAGGAGGACCAAGCGTGTTCCTGTTTCCACCCAAGC |
| | | | CCAAAGACACCCTGATGATTAGCCGAACCCCTGAAGTCACATGCGTGGT |
| | | | CGTGTCCGTGTCTCACGAGGACCCAGAAGTCAAGTTCAACTGGTACGTG |
| | | | GATGGCGTCGAGGTGCATAATGCCAAGACAAAACCCCGGGAGGAACAG |
| | | | TACAACAGCACCTATAGAGTCGTGTCCGTCCTGACAGTGCTGCACCAGG |
| | | | ATTGGCTGAACGGCAAGGAATATAAGTGCAAAGTGTCCAATAAGGCCC |
| | | | TGCCCGCTCCTATCGAGAAAACCATTTCTAAGGCAAAAGGCCAGCCTCG |
| | | | CGAACCACAGGTCTACGTGCTGCCTCCATCCCGGGACGAGCTGACAAA |
| | | | GAACCAGGTCTCTCTGCTGTGCCTGGTGAAAGGCTTCTATCCATCAGAT |
| | | | ATTGCTGTGGAGTGGGAAAGCAATGGGCAGCCCGAGAACAATTACCTG |
| | | | ACTTGGCCCCCTGTGCTGGACTCTGATGGGAGTTTCTTTCTGTATTCTAA |
| | | | GCTGACCGTGGATAAAAGTAGGTGGCAGCAGGGAAATGTCTTTAGTTG |
| | | | TTCAGTGATGCATGAAGCCCTGCATAACCACTACACCCAGAAAAGCCTG |
| | | | TCCCTGTCCCCCGGA |
| 100 | 17595 | Full nt | CAAGTGGGAGCCTGCCCTAGCGGCAAGAAGGCCCGCGAGATCGACGAG |
| | | | TCCCTGATCTTCTACAAGAAGTGGGAGCTGGAGGCATGCGTGGACGCC |
| | | | GCCCTGCTGGCCACACAGATGGATAGGGTGAACGCCATCCCTTTTACCT |
| | | | ATGAGCAGCTGGATGTGCTGAAGCACAAGCTGCCACAGGGACAGGGAG |
| | | | GAGGAGGCTCCGGAGGAGGCGGCAACTCTCCAGGGAAGGGGCGGAGC |
| | | | GCAAATGCCCAGGGACAGTCTGGACAGGGAGGACAGGTGCAGCTGGTG |
| | | | CAGAGCGGAGCCGAGGTGAAGAAGCCTGGGGCCAGCGTGAAGGTGTCT |
| | | | TGCAAGGCCTCTGGCTACAGCTTCACAGGCTATACCATGAATTGGGTGC |
| | | | GGCAGGCCCCAGGACAGGGACTGGAGTGGATGGGCCTGATCACACCCT |
| | | | ACAACGGGGCCAGCTCCTATAATCAGAAGTTTCGGGGCAAGGCCACCA |
| | | | TGACAGTGGACACCAGCACATCCACCGTGTACATGGAGCTGTCTAGCCT |
| | | | GAGAAGCGAGGATACCGCCGTGTACTATTGTGCCAGAGGCGGCTACGA |
| | | | CGGCAGAGGCTTTGATTATTGGGGCCAGGGCACACTGGTGACCGTGTCC |
| | | | TCTGCTAGCACTAAGGGGCCTTCCGTGTTTCCACTGGCTCCCTCTAGTAA |
| | | | ATCCACCTCTGGAGGCACAGCTGCACTGGGATGTCTGGTGAAGGATTAC |
| | | | TTCCCTGAACCAGTCACAGTGAGTTGGAACTCAGGGGCTCTGACAAGTG |
| | | | GAGTCCATACTTTTCCCGCAGTGCTGCAGTCAAGCGGACTGTACTCCCT |
| | | | GTCCTCTGTGGTCACCGTGCCTAGTTCAAGCCTGGGCACCCAGACATAT |
| | | | ATCTGCAACGTGAATCACAAGCCATCAAATACAAAAGTCGACAAGAAA |
| | | | GTGGAGCCCAAGAGCTGTGATAAAACTCATACCTGCCCACCTTGTCCGG |
| | | | CGCCAGAGGCAGCAGGAGGACCAAGCGTGTTCCTGTTTCCACCCAAGC |
| | | | CCAAAGACACCCTGATGATTAGCCGAACCCCTGAAGTCACATGCGTGGT |
| | | | CGTGTCCGTGTCTCACGAGGACCCAGAAGTCAAGTTCAACTGGTACGTG |
| | | | GATGGCGTCGAGGTGCATAATGCCAAGACAAAACCCCGGGAGGAACAG |
| | | | TACAACAGCACCTATAGAGTCGTGTCCGTCCTGACAGTGCTGCACCAGG |
| | | | ATTGGCTGAACGGCAAGGAATATAAGTGCAAAGTGTCCAATAAGGCCC |
| | | | TGCCCGCTCCTATCGAGAAAACCATTTCTAAGGCAAAAGGCCAGCCTCG |
| | | | CGAACCACAGGTCTACGTGCTGCCTCCATCCCGGGACGAGCTGACAAA |
| | | | GAACCAGGTCTCTCTGCTGTGCCTGGTGAAAGGCTTCTATCCATCAGAT |
| | | | ATTGCTGTGGAGTGGGAAAGCAATGGGCAGCCCGAGAACAATTACCTG |
| | | | ACTTGGCCCCCTGTGCTGGACTCTGATGGGAGTTTCTTTCTGTATTCTAA |
| | | | GCTGACCGTGGATAAAAGTAGGTGGCAGCAGGGAAATGTCTTTAGTTG |
| | | | TTCAGTGATGCATGAAGCCCTGCATAACCACTACACCCAGAAAAGCCTG |
| | | | TCCCTGTCCCCCGGA |
| 101 | 17601 | Full nt | CAAGTGGGAGCCTGCCCTAGCGGCAAGAAGGCCCGCGAGATCGACGAG |
| | | | TCCCTGATCTTCTACAAGAAGTGGGAGCTGGAGGCATGCGTGGACGCC |
| | | | GCCCTGCTGGCCACACAGATGGATAGGGTGAACGCCATCCCTTTTACCT |
| | | | ATGAGCAGCTGGATGTGCTGAAGCACAAGCTGCCACAGGGACAGGGAG |
| | | | GAGGAGGCTCCGGAGGAGGCGGCAACTCTCCAATGAGCGGGCGGAGCG |
| | | | CAAATGCCCAGGGACAGTCTGGACAGGGAGGACAGGTGCAGCTGGTGC |
| | | | AGAGCGGAGCCGAGGTGAAGAAGCCTGGGGCCAGCGTGAAGGTGTCTT |
| | | | GCAAGGCCTCTGGCTACAGCTTCACAGGCTATACCATGAATTGGGTGCG |
| | | | GCAGGCCCCAGGACAGGGACTGGAGTGGATGGGCCTGATCACACCCTA |
| | | | CAACGGGGCCAGCTCCTATAATCAGAAGTTTCGGGGCAAGGCCACCAT |
| | | | GACAGTGGACACCAGCACATCCACCGTGTACATGGAGCTGTCTAGCCTG |
| | | | AGAAGCGAGGATACCGCCGTGTACTATTGTGCCAGAGGCGGCTACGAC |
| | | | GGCAGAGGCTTTGATTATTGGGGCCAGGGCACACTGGTGACCGTGTCCT |
| | | | CTGCTAGCACTAAGGGGCCTTCCGTGTTTCCACTGGCTCCCTCTAGTAA |
| | | | ATCCACCTCTGGAGGCACAGCTGCACTGGGATGTCTGGTGAAGGATTAC |
| | | | TTCCCTGAACCAGTCACAGTGAGTTGGAACTCAGGGGCTCTGACAAGTG |
| | | | GAGTCCATACTTTTCCCGCAGTGCTGCAGTCAAGCGGACTGTACTCCCT |
| | | | GTCCTCTGTGGTCACCGTGCCTAGTTCAAGCCTGGGCACCCAGACATAT |
| | | | ATCTGCAACGTGAATCACAAGCCATCAAATACAAAAGTCGACAAGAAA |
| | | | GTGGAGCCCAAGAGCTGTGATAAAACTCATACCTGCCCACCTTGTCCGG |
| | | | CGCCAGAGGCAGCAGGAGGACCAAGCGTGTTCCTGTTTCCACCCAAGC |
| | | | CCAAAGACACCCTGATGATTAGCCGAACCCCTGAAGTCACATGCGTGGT |
| | | | CGTGTCCGTGTCTCACGAGGACCCAGAAGTCAAGTTCAACTGGTACGTG |
| | | | GATGGCGTCGAGGTGCATAATGCCAAGACAAAACCCCGGGAGGAACAG |
| | | | TACAACAGCACCTATAGAGTCGTGTCCGTCCTGACAGTGCTGCACCAGG |
| | | | ATTGGCTGAACGGCAAGGAATATAAGTGCAAAGTGTCCAATAAGGCCC |
| | | | TGCCCGCTCCTATCGAGAAAACCATTTCTAAGGCAAAAGGCCAGCCTCG |
| | | | CGAACCACAGGTCTACGTGCTGCCTCCATCCCGGGACGAGCTGACAAA |
| | | | GAACCAGGTCTCTCTGCTGTGCCTGGTGAAAGGCTTCTATCCATCAGAT |
| | | | ATTGCTGTGGAGTGGGAAAGCAATGGGCAGCCCGAGAACAATTACCTG |
| | | | ACTTGGCCCCCTGTGCTGGACTCTGATGGGAGTTTCTTTCTGTATTCTAA |
| | | | GCTGACCGTGGATAAAAGTAGGTGGCAGCAGGGAAATGTCTTTAGTTG |
| | | | TTCAGTGATGCATGAAGCCCTGCATAACCACTACACCCAGAAAAGCCTG |
| | | | TCCCTGTCCCCCGGA |
| 102 | 17871 | Full nt | ATCTGGGAGCTGAAGAAGGACGTGTACGTGGTGGAGCTGGACTGGTAT |
| | | | CCAGATGCACCAGGAGAGATGGTGGTGCTGACCTGCGACACACCAGAG |
| | | | GAGGATGGCATCACCTGGACACTGGACCAGAGCTCCGAGGTGCTGGGC |
| | | | AGCGGCAAGACCCTGACAATCCAGGTGAAGGAGTTCGGCGATGCCGGA |
| | | | CAGTACACATGTCACAAGGGCGGCGAGGTGCTGTCTCACAGCCTGCTGC |
| | | | TGCTGCACAAGAAGGAGGATGGCATCTGGTCCACAGACATCCTGAAGG |
| | | | ATCAGAAGGAGCCCAAGAACAAGACCTTCCTGAGGTGCGAGGCCAAGA |
| | | | ATTATTCTGGCCGCTTTACCTGTTGGTGGCTGACCACAATCTCTACCGAC |
| | | | CTGACCTTCAGCGTGAAGTCTAGCCGGGGCTCCTCTGATCCTCAGGGAG |
| | | | TGACATGCGGAGCCGCCACCCTGAGCGCCGAGCGGGTGAGAGGCGACA |
| | | | ACAAGGAGTACGAGTATAGCGTGGAGTGCCAGGAGGATTCCGCCTGTC |
| | | | CCGCCGCCGAGGAGTCCCTGCCTATCGAAGTGATGGTGGACGCCGTGC |
| | | | ACAAGCTGAAGTACGAGAATTATACAAGCTCCTTCTTTATCAGGGACAT |
| | | | CATCAAGCCAGATCCCCCTAAGAACCTGCAGCTGAAGCCCCTGAAGAA |
| | | | CAGCAGACAGGTGGAGGTGTCTTGGGAGTACCCTGATACCTGGTCCAC |
| | | | ACCACACAGCTATTTCTCCCTGACCTTTTGCGTGCAGGTGCAGGGCAAG |
| | | | TCTAAGCGGGAGAAGAAGGACAGAGTGTTTACCGATAAGACAAGCGCC |
| | | | ACCGTGATCTGTAGAAAGAACGCCTCCATCTCTGTGAGGGCCCAGGACC |
| | | | GCTACTATTCTAGCTCCTGGTCTGAGTGGGCCAGCGTGCCTTGTTCC |
| 103 | 17872 | Full nt | AGAAACCTGCCCGTGGCCACACCCGATCCTGGCATGTTTCCCTGCCTGC |
| | | | ACCACAGCCAGAACCTGCTGCGGGCCGTGTCCAATATGCTGCAGAAGG |
| | | | CCAGACAGACCCTGGAGTTCTACCCCTGTACATCTGAGGAGATCGACCA |
| | | | CGAGGATATCACCAAGGACAAGACCTCCACAGTGGAGGCCTGCCTGCC |
| | | | TCTGGAGCTGACAAAGAACGAGTCCTGTCTGAACAGCCGGGAGACCAG |
| | | | CTTCATCACAAATGGCTCCTGCCTGGCCTCTCGCAAGACCAGCTTTATG |
| | | | ATGGCCCTGTGCCTGAGCTCCATCTACGAGGATCTGAAGATGTATCAGG |
| | | | TGGAGTTCAAGACAATGAACGCCAAGCTGCTGATGGACCCTAAGCGGC |
| | | | AGATCTTTCTGGATCAGAATATGCTGGCCGTGATCGACGAGCTGATGCA |
| | | | GGCCCTGAACTTTAATAGCGAGACCGTGCCTCAGAAGTCTAGCCTGGAG |
| | | | GAGCCAGATTTCTACAAGACAAAGATCAAGCTGTGCATCCTGCTGCACG |
| | | | CCTTCCGGATCAGAGCCGTGACCATCGACAGAGTGATGTCCTATCTGAA |
| | | | CGCCTCT |
| 104 | 17875 | Full nt | GAGCCAAAGAGCTCCGACAAGACCCACACATGCCCCCCTTGTCCGGCG |
| | | | CCAGAGGCTGCAGGAGGACCAAGCGTGTTCCTGTTTCCACCCAAGCCTA |
| | | | AAGACACACTGATGATTTCCCGAACCCCCGAAGTCACATGCGTGGTCGT |
| | | | GTCTGTGAGTCACGAGGACCCTGAAGTCAAGTTCAACTGGTACGTGGAT |
| | | | GGCGTCGAGGTGCATAATGCCAAGACTAAACCTAGGGAGGAACAGTAC |
| | | | AACTCAACCTATCGCGTCGTGAGCGTCCTGACAGTGCTGCACCAGGATT |
| | | | GGCTGAACGGCAAAGAATATAAGTGCAAAGTGAGCAATAAGGCCCTGC |
| | | | CCGCTCCTATCGAGAAAACCATTTCCAAGGCTAAAGGGCAGCCTCGCG |
| | | | AACCTCAGGTGTACGTGTATCCCCCTTCCAGAGATGAGCTGACCAAGAA |
| | | | CCAGGTGTCTCTGACATGCCTGGTGAAGGGCTTCTACCCTAGCGACATC |
| | | | GCCGTGGAGTGGGAGTCCAATGGCCAGCCAGAGAACAATTATAAGACC |
| | | | ACACCACCCGTGCTGGACAGCGATGGCTCCTTCGCCCTGGTGTCCAAGC |
| | | | TGACCGTGGATAAGTCTAGGTGGCAGCAGGGCAACGTGTTTTCCTGTTC |
| | | | TGTGATGCACGAGGCCCTGCACAATCACTACACCCAGAAGAGCCTGTCC |
| | | | CTGTCTCCCGGCAGAAACCTGCCTGTGGCCACACCTGACCCAGGCATGT |
| | | | TCCCATGCCTGCACCACTCTCAGAACCTGCTGAGGGCCGTGAGCAATAT |
| | | | GCTGCAGAAGGCCCGCCAGACCCTGGAGTTTTATCCCTGTACATCCGAG |
| | | | GAGATCGACCACGAGGATATCACCAAGGATAAGACCAGCACAGTGGAG |
| | | | GCCTGCCTGCCTCTGGAGCTGACAAAGAACGAGTCTTGTCTGAATAGCC |
| | | | GGGAGACCTCCTTCATCACAAATGGCTCTTGCCTGGCCAGCAGAAAGAC |
| | | | CTCCTTTATGATGGCCCTGTGCCTGAGCTCCATCTACGAGGACCTGAAG |
| | | | ATGTATCAGGTGGAGTTCAAGACAATGAACGCCAAGCTGCTGATGGAC |
| | | | CCCAAGCGGCAGATCTTTCTGGATCAGAATATGCTGGCCGTGATCGACG |
| | | | AGCTGATGCAGGCCCTGAACTTTAATTCCGAGACCGTGCCACAGAAGTC |
| | | | TAGCCTGGAGGAGCCCGATTTCTACAAGACAAAGATCAAGCTGTGCAT |
| | | | CCTGCTGCACGCCTTTCGGATCAGAGCCGTGACCATCGACAGAGTGATG |
| | | | TCTTATCTGAACGCCAGC |
| 105 | 17876 | Full nt | GAGCCAAAGAGCTCCGACAAGACCCACACATGCCCCCCTTGTCCGGCG |
| | | | CCAGAGGCTGCAGGAGGACCAAGCGTGTTCCTGTTTCCACCCAAGCCTA |
| | | | AAGACACACTGATGATTTCCCGAACCCCCGAAGTCACATGCGTGGTCGT |
| | | | GTCTGTGAGTCACGAGGACCCTGAAGTCAAGTTCAACTGGTACGTGGAT |
| | | | GGCGTCGAGGTGCATAATGCCAAGACTAAACCTAGGGAGGAACAGTAC |
| | | | AACTCAACCTATCGCGTCGTGAGCGTCCTGACAGTGCTGCACCAGGATT |
| | | | GGCTGAACGGCAAAGAATATAAGTGCAAAGTGAGCAATAAGGCCCTGC |
| | | | CCGCTCCTATCGAGAAAACCATTTCCAAGGCTAAAGGGCAGCCTCGCG |
| | | | AACCTCAGGTGTACGTGTATCCACCCTCCCGCGATGAGCTGACAAAGAA |
| | | | CCAGGTGTCTCTGACCTGTCTGGTGAAGGGCTTTTACCCTAGCGACATC |
| | | | GCCGTGGAGTGGGAGTCCAATGGCCAGCCAGAGAACAATTATAAGACC |
| | | | ACACCTCCAGTGCTGGACTCTGATGGCAGCTTCGCCCTGGTGTCTAAGC |
| | | | TGACAGTGGACAAGAGCAGATGGCAGCAGGGCAACGTGTTTTCTTGTA |
| | | | GCGTGATGCACGAGGCCCTGCACAATCACTACACCCAGAAGTCCCTGA |
| | | | GCTTAAGCCCTGGAGGCAGCGCCGATGGAGGAATCTGGGAGCTGAAGA |
| | | | AGGACGTGTACGTGGTGGAGCTGGACTGGTATCCAGATGCACCAGGAG |
| | | | AGATGGTGGTGCTGACCTGCGACACACCAGAGGAGGATGGCATCACCT |
| | | | GGACACTGGATCAGAGCTCCGAGGTGCTGGGCTCCGGCAAGACCCTGA |
| | | | CAATCCAGGTGAAGGAGTTCGGCGACGCCGGACAGTACACCTGTCACA |
| | | | AGGGCGGCGAGGTGCTGTCCCACTCTCTGCTGCTGCTGCACAAGAAGG |
| | | | AGGACGGCATCTGGAGCACAGACATCCTGAAGGATCAGAAGGAGCCCA |
| | | | AGAACAAGACCTTCCTGAGGTGCGAGGCCAAGAATTATAGCGGCAGAT |
| | | | TCACCTGTTGGTGGCTGACCACAATCTCCACCGATCTGACATTTTCTGTG |
| | | | AAGTCTAGCAGGGGCTCCTCTGACCCTCAGGGAGTGACATGCGGAGCC |
| | | | GCCACCCTGAGCGCCGAGCGGGTGAGAGGCGATAACAAGGAGTACGAG |
| | | | TATTCCGTGGAGTGCCAGGAGGACTCTGCCTGTCCCGCCGCCGAGGAGT |
| | | | CCCTGCCTATCGAAGTGATGGTGGATGCCGTGCACAAGCTGAAGTACG |
| | | | AGAATTATACAAGCTCCTTCTTTATCAGGGACATCATCAAGCCCGATCC |
| | | | CCCTAAGAACCTGCAGCTGAAGCCTCTGAAGAATAGCCGCCAGGTGGA |
| | | | GGTGTCCTGGGAGTACCCTGACACCTGGAGCACACCACACTCCTATTTC |
| | | | TCTCTGACCTTTTGCGTGCAGGTGCAGGGCAAGTCTAAGAGGGAGAAG |
| | | | AAGGACCGCGTGTTCACCGATAAGACAAGCGCCACCGTGATCTGTCGG |
| | | | AAGAACGCCAGCATCTCCGTGCGGGCCCAGGATAGATACTATTCTAGCT |
| | | | CCTGGAGCGAGTGGGCCTCCGTGCCATGTTCTGGAGGAGGAGGCAGCG |
| | | | GCGGAGGAGGCTCCGGCGGCGGCGGCTCTAGAAATCTGCCAGTGGCCA |
| | | | CCCCTGACCCAGGCATGTTCCCCTGCCTGCACCACTCTCAGAACCTGCT |
| | | | GCGGGCCGTGAGCAATATGCTGCAGAAGGCCAGACAGACACTGGAGTT |
| | | | TTACCCATGTACCTCCGAGGAGATCGACCACGAGGATATCACAAAGGA |
| | | | TAAGACCTCTACAGTGGAGGCATGCCTGCCACTGGAGCTGACCAAGAA |
| | | | CGAGAGCTGTCTGAACAGCCGGGAGACATCTTTCATCACCAACGGCAG |
| | | | CTGCCTGGCCTCCAGAAAGACATCTTTTATGATGGCCCTGTGCCTGTCT |
| | | | AGCATCTACGAGGACCTGAAGATGTATCAGGTGGAGTTCAAGACCATG |
| | | | AACGCCAAGCTGCTGATGGACCCTAAGAGGCAGATCTTTCTGGATCAG |
| | | | AATATGCTGGCCGTGATCGACGAGCTGATGCAGGCCCTGAACTTCAATA |
| | | | GCGAGACAGTGCCACAGAAGTCCTCTCTGGAGGAGCCCGATTTCTACA |
| | | | AGACCAAGATCAAGCTGTGCATCCTGCTGCACGCCTTCCGGATCAGAGC |
| | | | CGTGACCATCGACCGCGTGATGAGCTACCTGAACGCCAGC |
| 106 | 17877 | Full nt | AGAAACCTGCCAGTGGCCACACCAGATCCCGGCATGTTTCCATGCCTGC |
| | | | ACCACTCCCAGAACCTGCTGCGGGCCGTGTCTAATATGCTGCAGAAGGC |
| | | | CAGACAGACCCTGGAGTTCTACCCATGTACAAGCGAGGAGATCGACCA |
| | | | CGAGGATATCACCAAGGACAAGACCTCCACAGTGGAGGCATGCCTGCC |
| | | | ACTGGAGCTGACAAAGAACGAGAGCTGTCTGAACAGCCGGGAGACCAG |
| | | | CTTCATCACAAATGGCAGCTGCCTGGCCTCCCGCAAGACCTCTTTTATG |
| | | | ATGGCCCTGTGCCTGAGCTCCATCTACGAGGATCTGAAGATGTATCAGG |
| | | | TGGAGTTCAAGACAATGAACGCCAAGCTGCTGATGGACCCCAAGCGGC |
| | | | AGATCTTTCTGGATCAGAATATGCTGGCCGTGATCGACGAGCTGATGCA |
| | | | GGCCCTGAACTTTAATAGCGAGACCGTGCCCCAGAAGTCTAGCCTGGA |
| | | | GGAGCCTGATTTCTACAAGACAAAGATCAAGCTGTGCATCCTGCTGCAC |
| | | | GCCTTCCGGATCAGAGCCGTGACCATCGACAGAGTGATGAGCTATCTGA |
| | | | ACGCCTCCGGAGGAGGAGGCTCTGGAGGAGGCGGCAGCGAGCCTAAGT |
| | | | CCTCTGACAAGACCCACACATGCCCCCCTTGTCCGGCGCCAGAGGCTGC |
| | | | AGGAGGACCAAGCGTGTTCCTGTTTCCACCCAAGCCTAAAGACACACTG |
| | | | ATGATTTCCCGAACCCCCGAAGTCACATGCGTGGTCGTGTCTGTGAGTC |
| | | | ACGAGGACCCTGAAGTCAAGTTCAACTGGTACGTGGATGGCGTCGAGG |
| | | | TGCATAATGCCAAGACTAAACCTAGGGAGGAACAGTACAACTCAACCT |
| | | | ATCGCGTCGTGAGCGTCCTGACAGTGCTGCACCAGGATTGGCTGAACGG |
| | | | CAAAGAATATAAGTGCAAAGTGAGCAATAAGGCCCTGCCCGCTCCTAT |
| | | | CGAGAAAACCATTTCCAAGGCTAAAGGGCAGCCTCGCGAACCACAGGT |
| | | | CTACGTGTATCCTCCAAGCCGGGACGAGCTGACAAAGAACCAGGTCTC |
| | | | CCTGACTTGTCTGGTGAAAGGGTTTTACCCTAGTGATATCGCTGTGGAG |
| | | | TGGGAATCAAATGGACAGCCAGAGAACAATTATAAGACTACCCCCCCT |
| | | | GTGCTGGACAGTGATGGGTCATTCGCACTGGTCTCCAAGCTGACAGTGG |
| | | | ACAAATCTCGGTGGCAGCAGGGAAATGTCTTTTCATGTAGCGTGATGCA |
| | | | TGAAGCACTGCACAACCATTACACCCAGAAGTCACTGTCACTGTCACCA |
| | | | GGA |
| 107 | 17879 | Full nt | ATCTGGGAGCTGAAGAAGGACGTGTACGTGGTGGAGCTGGACTGGTAT |
| | | | CCTGATGCCCCAGGCGAGATGGTGGTGCTGACCTGCGACACACCCGAG |
| | | | GAGGATGGCATCACCTGGACACTGGACCAGAGCTCCGAGGTGCTGGGC |
| | | | AGCGGCAAGACCCTGACAATCCAGGTGAAGGAGTTCGGCGATGCCGGA |
| | | | CAGTACACATGTCACAAGGGCGGCGAGGTGCTGTCCCACTCTCTGCTGC |
| | | | TGCTGCACAAGAAGGAGGATGGCATCTGGTCTACAGACATCCTGAAGG |
| | | | ATCAGAAGGAGCCTAAGAACAAGACCTTCCTGAGGTGCGAGGCCAAGA |
| | | | ATTATAGCGGCAGATTCACCTGTTGGTGGCTGACCACAATCAGCACCGA |
| | | | CCTGACATTTTCCGTGAAGTCTAGCCGGGGCTCCTCTGATCCACAGGGA |
| | | | GTGACATGCGGAGCCGCCACCCTGAGCGCCGAGCGGGTGAGAGGCGAC |
| | | | AACAAGGAGTACGAGTATTCCGTGGAGTGCCAGGAGGATTCTGCCTGT |
| | | | CCAGCCGCCGAGGAGTCCCTGCCAATCGAAGTGATGGTGGACGCCGTG |
| | | | CACAAGCTGAAGTACGAGAATTATACAAGCTCCTTCTTTATCAGGGACA |
| | | | TCATCAAGCCTGATCCCCCTAAGAACCTGCAGCTGAAGCCCCTGAAGAA |
| | | | CAGCAGACAGGTGGAGGTGAGCTGGGAGTACCCCGATACCTGGAGCAC |
| | | | ACCTCACTCTTATTTCAGCCTGACCTTTTGCGTGCAGGTGCAGGGCAAG |
| | | | AGCAAGCGGGAGAAGAAGGACAGAGTGTTTACCGATAAGACATCCGCC |
| | | | ACCGTGATCTGTAGAAAGAACGCCAGCATCTCCGTGAGGGCACAGGAC |
| | | | CGCTACTATTCTAGCTCCTGGTCCGAGTGGGCCTCTGTGCCCTGTAGCG |
| | | | GAGGAGGAGGCTCCGGAGGAGGAGGCTCTGAGCCTAAGTCTAGCGATA |
| | | | AGACCCACACATGCCCACCCTGTCCGGCGCCAGAGGCTGCAGGAGGAC |
| | | | CAAGCGTGTTCCTGTTTCCACCCAAGCCTAAAGACACACTGATGATTTC |
| | | | CCGAACCCCCGAAGTCACATGCGTGGTCGTGTCTGTGAGTCACGAGGAC |
| | | | CCTGAAGTCAAGTTCAACTGGTACGTGGATGGCGTCGAGGTGCATAATG |
| | | | CCAAGACTAAACCTAGGGAGGAACAGTACAACTCAACCTATCGCGTCG |
| | | | TGAGCGTCCTGACAGTGCTGCACCAGGATTGGCTGAACGGCAAAGAAT |
| | | | ATAAGTGCAAAGTGAGCAATAAGGCCCTGCCCGCTCCTATCGAGAAAA |
| | | | CCATTTCCAAGGCTAAAGGGCAGCCTCGCGAACCACAGGTCTACGTGTA |
| | | | TCCTCCAAGCCGGGACGAGCTGACAAAGAACCAGGTCTCCCTGACTTGT |
| | | | CTGGTGAAAGGGTTTTACCCTAGTGATATCGCTGTGGAGTGGGAATCAA |
| | | | ATGGACAGCCAGAGAACAATTATAAGACTACCCCCCCTGTGCTGGACA |
| | | | GTGATGGGTCATTCGCACTGGTCTCCAAGCTGACAGTGGACAAATCTCG |
| | | | GTGGCAGCAGGGAAATGTCTTTTCATGTAGCGTGATGCATGAAGCACTG |
| | | | CACAACCATTACACCCAGAAGTCACTGTCACTGTCACCAGGA |
| 108 | 17880 | Full nt | GAGCCAAAGAGCTCCGACAAGACCCACACATGCCCCCCTTGTCCGGCG |
| | | | CCAGAGGCAGCAGGAGGACCAAGCGTGTTCCTGTTTCCACCCAAGCCC |
| | | | AAAGACACCCTGATGATTAGCCGAACCCCTGAAGTCACATGCGTGGTC |
| | | | GTGTCCGTGTCTCACGAGGACCCAGAAGTCAAGTTCAACTGGTACGTGG |
| | | | ATGGCGTCGAGGTGCATAATGCCAAGACAAAACCCCGGGAGGAACAGT |
| | | | ACAACAGCACCTATAGAGTCGTGTCCGTCCTGACAGTGCTGCACCAGGA |
| | | | TTGGCTGAACGGCAAGGAATATAAGTGCAAAGTGTCCAATAAGGCCCT |
| | | | GCCCGCTCCTATCGAGAAAACCATTTCTAAGGCAAAAGGCCAGCCTCGC |
| | | | GAGCCTCAGGTGTACGTGCTGCCACCTTCCCGCGACGAGCTGACCAAGA |
| | | | ACCAGGTGTCTCTGCTGTGCCTGGTGAAGGGCTTTTATCCTAGCGATAT |
| | | | CGCCGTGGAGTGGGAGTCCAATGGCCAGCCAGAGAACAATTACCTGAC |
| | | | CTGGCCACCCGTGCTGGACTCTGATGGCAGCTTCTTTCTGTATTCCAAGC |
| | | | TGACAGTGGACAAGTCTCGGTGGCAGCAGGGCAACGTGTTCTCTTGTAG |
| | | | CGTGATGCACGAGGCCCTGCACAATCACTACACCCAGAAGTCCCTGAG |
| | | | CTTAAGCCCTGGAGGAGGAGGAGGCTCTGGAGGAGGAGGCAGCATCTG |
| | | | GGAGCTGAAGAAGGACGTGTACGTGGTGGAGCTGGACTGGTATCCAGA |
| | | | TGCACCAGGAGAGATGGTGGTGCTGACCTGCGACACACCAGAGGAGGA |
| | | | TGGCATCACCTGGACACTGGACCAGAGCTCCGAGGTGCTGGGCAGCGG |
| | | | CAAGACCCTGACAATCCAGGTGAAGGAGTTCGGCGATGCCGGACAGTA |
| | | | CACATGTCACAAGGGCGGCGAGGTGCTGTCTCACAGCCTGCTGCTGCTG |
| | | | CACAAGAAGGAGGATGGCATCTGGAGCACAGACATCCTGAAGGATCAG |
| | | | AAGGAGCCCAAGAACAAGACCTTCCTGAGGTGCGAGGCCAAGAATTAT |
| | | | AGCGGCAGATTCACCTGTTGGTGGCTGACCACAATCTCCACCGACCTGA |
| | | | CATTTTCTGTGAAGTCTAGCAGGGGCTCCTCTGATCCTCAGGGAGTGAC |
| | | | ATGCGGAGCCGCCACCCTGTCTGCCGAGCGGGTGAGAGGCGACAACAA |
| | | | GGAGTACGAGTATTCTGTGGAGTGCCAGGAGGATAGCGCCTGTCCCGC |
| | | | CGCCGAGGAGTCCCTGCCTATCGAAGTGATGGTGGACGCCGTGCACAA |
| | | | GCTGAAGTACGAGAATTATACAAGCTCCTTCTTTATCCGGGACATCATC |
| | | | AAGCCAGATCCCCCTAAGAACCTGCAGCTGAAGCCCCTGAAGAATAGC |
| | | | AGACAGGTGGAGGTGTCCTGGGAGTACCCTGATACCTGGTCCACACCA |
| | | | CACAGCTATTTCTCCCTGACCTTTTGCGTGCAGGTGCAGGGCAAGTCCA |
| | | | AGCGGGAGAAGAAGGACAGAGTGTTCACCGATAAGACATCTGCCACCG |
| | | | TGATCTGTCGGAAGAACGCCTCCATCTCTGTGAGGGCCCAGGACCGCTA |
| | | | CTATTCTAGCTCCTGGTCTGAGTGGGCCAGCGTGCCCTGTTCC |
| 109 | 17881 | Full nt | GAGCCAAAGAGCTCCGACAAGACCCACACATGCCCCCCTTGTCCGGCG |
| | | | CCAGAGGCAGCAGGAGGACCAAGCGTGTTCCTGTTTCCACCCAAGCCC |
| | | | AAAGACACCCTGATGATTAGCCGAACCCCTGAAGTCACATGCGTGGTC |
| | | | GTGTCCGTGTCTCACGAGGACCCAGAAGTCAAGTTCAACTGGTACGTGG |
| | | | ATGGCGTCGAGGTGCATAATGCCAAGACAAAACCCCGGGAGGAACAGT |
| | | | ACAACAGCACCTATAGAGTCGTGTCCGTCCTGACAGTGCTGCACCAGGA |
| | | | TTGGCTGAACGGCAAGGAATATAAGTGCAAAGTGTCCAATAAGGCCCT |
| | | | GCCCGCTCCTATCGAGAAAACCATTTCTAAGGCAAAAGGCCAGCCTCGC |
| | | | GAGCCTCAGGTGTACGTGCTGCCACCTTCCCGCGACGAGCTGACCAAGA |
| | | | ACCAGGTGTCTCTGCTGTGCCTGGTGAAGGGCTTTTATCCTAGCGATAT |
| | | | CGCCGTGGAGTGGGAGTCCAATGGCCAGCCAGAGAACAATTACCTGAC |
| | | | CTGGCCACCCGTGCTGGACTCTGATGGCAGCTTCTTTCTGTATTCCAAGC |
| | | | TGACAGTGGACAAGTCTCGGTGGCAGCAGGGCAACGTGTTCTCTTGTAG |
| | | | CGTGATGCACGAGGCCCTGCACAATCACTACACCCAGAAGTCCCTGAG |
| | | | CTTAAGCCCAGGCCGGAACCTGCCAGTGGCCACCCCCGATCCTGGCATG |
| | | | TTCCCATGCCTGCACCACAGCCAGAACCTGCTGAGGGCCGTGTCCAATA |
| | | | TGCTGCAGAAGGCCCGCCAGACCCTGGAGTTTTACCCCTGTACATCTGA |
| | | | GGAGATCGACCACGAGGATATCACCAAGGACAAGACCTCCACAGTGGA |
| | | | GGCCTGCCTGCCTCTGGAGCTGACAAAGAACGAGTCCTGTCTGAACAGC |
| | | | CGGGAGACCAGCTTCATCACAAATGGCTCCTGCCTGGCCTCTAGAAAGA |
| | | | CCAGCTTTATGATGGCCCTGTGCCTGAGCTCCATCTACGAGGATCTGAA |
| | | | GATGTATCAGGTGGAGTTCAAGACAATGAACGCCAAGCTGCTGATGGA |
| | | | CCCCAAGAGGCAGATCTTTCTGGATCAGAATATGCTGGCCGTGATCGAC |
| | | | GAGCTGATGCAGGCCCTGAACTTCAATAGCGAGACCGTGCCTCAGAAG |
| | | | TCTAGCCTGGAGGAGCCAGATTTCTACAAGACAAAGATCAAGCTGTGC |
| | | | ATCCTGCTGCACGCCTTTCGGATCAGAGCCGTGACAATCGACCGCGTGA |
| | | | TGTCCTATCTGAACGCCTCT |
| 110 | 17906 | Full nt | GAGCCAAAGAGCTCCGACAAGACCCACACATGCCCCCCTTGTCCGGCG |
| | | | CCAGAGGCTGCAGGAGGACCAAGCGTGTTCCTGTTTCCACCCAAGCCTA |
| | | | AAGACACACTGATGATTTCCCGAACCCCCGAAGTCACATGCGTGGTCGT |
| | | | GTCTGTGAGTCACGAGGACCCTGAAGTCAAGTTCAACTGGTACGTGGAT |
| | | | GGCGTCGAGGTGCATAATGCCAAGACTAAACCTAGGGAGGAACAGTAC |
| | | | AACTCAACCTATCGCGTCGTGAGCGTCCTGACAGTGCTGCACCAGGATT |
| | | | GGCTGAACGGCAAAGAATATAAGTGCAAAGTGAGCAATAAGGCCCTGC |
| | | | CCGCTCCTATCGAGAAAACCATTTCCAAGGCTAAAGGGCAGCCTCGCG |
| | | | AACCCCAGGTGTACGTGTATCCCCCTTCTCGGGACGAGCTGACCAAGAA |
| | | | CCAGGTGAGCCTGACATGCCTGGTGAAGGGCTTCTACCCATCCGATATC |
| | | | GCCGTGGAGTGGGAGTCTAATGGCCAGCCCGAGAACAATTATAAGACC |
| | | | ACACCACCCGTGCTGGACTCCGATGGCTCTTTCGCCCTGGTGTCTAAGC |
| | | | TGACCGTGGACAAGAGCAGGTGGCAGCAGGGCAACGTGTTTTCCTGCT |
| | | | CTGTGATGCACGAGGCCCTGCACAATCACTACACCCAGAAGAGCCTGA |
| | | | GCTTAAGCCCTGGCAGGGCAGTGCCAGGAGGCAGCTCCCCCGCCTGGA |
| | | | CCCAGTGCCAGCAGCTGAGCCAGAAGCTGTGCACACTGGCCTGGTCCG |
| | | | CCCACCCACTGGTGGGACACATGGACCTGAGAGAGGAGGGCGATGAGG |
| | | | AGACCACAAACGACGTGCCTCACATCCAGTGCGGCGACGGCTGTGATC |
| | | | CACAGGGCCTGAGGGATAATTCTCAGTTCTGCCTGCAGCGCATCCACCA |
| | | | GGGCCTGATCTTCTACGAGAAGCTGCTGGGCAGCGATATCTTTACCGGA |
| | | | GAGCCATCTCTGCTGCCAGACAGCCCTGTGGGACAGCTGCACGCCTCCC |
| | | | TGCTGGGCCTGTCTCAGCTGCTGCAGCCAGAGGGACACCACTGGGAGA |
| | | | CACAGCAGATCCCTTCTCTGAGCCCATCCCAGCCATGGCAGCGGCTGCT |
| | | | GCTGCGGTTCAAGATCCTGCGGTCCCTGCAGGCCTTCGTGGCAGTGGCA |
| | | | GCAAGAGTGTTTGCACACGGAGCCGCCACCCTGTCTCCT |
| 111 | 17907 | Full nt | AGAGCAGTGCCAGGCGGCAGCTCCCCTGCCTGGACCCAGTGCCAGCAG |
| | | | CTGTCCCAGAAGCTGTGCACACTGGCCTGGTCTGCCCACCCTCTGGTGG |
| | | | GACACATGGACCTGCGGGAGGAGGGCGATGAGGAGACCACAAACGAC |
| | | | GTGCCACACATCCAGTGCGGCGACGGATGTGATCCACAGGGCCTGCGG |
| | | | GATAATAGCCAGTTCTGCCTGCAGAGAATCCACCAGGGCCTGATCTTCT |
| | | | ACGAGAAGCTGCTGGGCTCCGATATCTTTACCGGAGAGCCATCCCTGCT |
| | | | GCCAGACTCTCCAGTGGGACAGCTGCACGCCAGCCTGCTGGGCCTGTCC |
| | | | CAGCTGCTGCAGCCTGAGGGCCACCACTGGGAGACACAGCAGATCCCA |
| | | | TCCCTGTCTCCTAGCCAGCCATGGCAGAGGCTGCTGCTGCGCTTTAAGA |
| | | | TCCTGAGGTCTCTGCAGGCCTTCGTGGCAGTGGCAGCACGCGTGTTTGC |
| | | | CCACGGAGCCGCCACACTGAGCCCAGGAGGAGGAGGCTCTGGAGGAGG |
| | | | AGGCAGCGAGCCTAAGTCTAGCGACAAGACCCACACATGCCCCCCTTG |
| | | | TCCGGCGCCAGAGGCTGCAGGAGGACCAAGCGTGTTCCTGTTTCCACCC |
| | | | AAGCCTAAAGACACACTGATGATTTCCCGAACCCCCGAAGTCACATGC |
| | | | GTGGTCGTGTCTGTGAGTCACGAGGACCCTGAAGTCAAGTTCAACTGGT |
| | | | ACGTGGATGGCGTCGAGGTGCATAATGCCAAGACTAAACCTAGGGAGG |
| | | | AACAGTACAACTCAACCTATCGCGTCGTGAGCGTCCTGACAGTGCTGCA |
| | | | CCAGGATTGGCTGAACGGCAAAGAATATAAGTGCAAAGTGAGCAATAA |
| | | | GGCCCTGCCCGCTCCTATCGAGAAAACCATTTCCAAGGCTAAAGGGCA |
| | | | GCCTCGCGAACCACAGGTCTACGTGTATCCTCCAAGCCGGGACGAGCTG |
| | | | ACAAAGAACCAGGTCTCCCTGACTTGTCTGGTGAAAGGGTTTTACCCTA |
| | | | GTGATATCGCTGTGGAGTGGGAATCAAATGGACAGCCAGAGAACAATT |
| | | | ATAAGACTACCCCCCCTGTGCTGGACAGTGATGGGTCATTCGCACTGGT |
| | | | CTCCAAGCTGACAGTGGACAAATCTCGGTGGCAGCAGGGAAATGTCTTT |
| | | | TCATGTAGCGTGATGCATGAAGCACTGCACAACCATTACACCCAGAAGT |
| | | | CACTGTCACTGTCACCAGGA |
| 112 | 17908 | Full nt | AGAGCCGTGCCTGGCGGCAGCTCCCCAGCCTGGACCCAGTGCCAGCAG |
| | | | CTGAGCCAGAAGCTGTGCACACTGGCCTGGTCCGCCCACCCACTGGTGG |
| | | | GACACATGGACCTGCGGGAGGAGGGCGATGAGGAGACCACAAACGAC |
| | | | GTGCCACACATCCAGTGCGGCGACGGATGTGATCCTCAGGGCCTGCGG |
| | | | GATAATTCTCAGTTCTGCCTGCAGAGAATCCACCAGGGCCTGATCTTCT |
| | | | ACGAGAAGCTGCTGGGCAGCGATATCTTTACCGGAGAGCCTTCTCTGCT |
| | | | GCCAGACAGCCCTGTGGGACAGCTGCACGCCTCCCTGCTGGGCCTGTCT |
| | | | CAGCTGCTGCAGCCAGAGGGCCACCACTGGGAGACACAGCAGATCCCC |
| | | | TCTCTGAGCCCATCCCAGCCATGGCAGAGGCTGCTGCTGCGCTTTAAGA |
| | | | TCCTGAGGTCCCTGCAGGCCTTCGTGGCAGTGGCAGCACGCGTGTTTGC |
| | | | CCACGGAGCCGCCACACTGTCTCCC |
| 113 | 17942 | Full nt | GAGCCAAAGAGCTCCGACAAGACCCACACATGCCCCCCTTGTCCGGCG |
| | | | CCAGAGGCTGCAGGAGGACCAAGCGTGTTCCTGTTTCCACCCAAGCCTA |
| | | | AAGACACACTGATGATTTCCCGAACCCCCGAAGTCACATGCGTGGTCGT |
| | | | GTCTGTGAGTCACGAGGACCCTGAAGTCAAGTTCAACTGGTACGTGGAT |
| | | | GGCGTCGAGGTGCATAATGCCAAGACTAAACCTAGGGAGGAACAGTAC |
| | | | AACTCAACCTATCGCGTCGTGAGCGTCCTGACAGTGCTGCACCAGGATT |
| | | | GGCTGAACGGCAAAGAATATAAGTGCAAAGTGAGCAATAAGGCCCTGC |
| | | | CCGCTCCTATCGAGAAAACCATTTCCAAGGCTAAAGGGCAGCCTCGCG |
| | | | AACCCCAGGTGTACGTGTATCCCCCTTCTCGGGACGAGCTGACCAAGAA |
| | | | CCAGGTGAGCCTGACATGCCTGGTGAAGGGCTTCTACCCATCCGATATC |
| | | | GCCGTGGAGTGGGAGTCTAATGGCCAGCCCGAGAACAATTATAAGACC |
| | | | ACACCACCCGTGCTGGACTCCGATGGCTCTTTCGCCCTGGTGTCTAAGC |
| | | | TGACCGTGGACAAGAGCAGGTGGCAGCAGGGCAACGTGTTTTCCTGCT |
| | | | CTGTGATGCACGAGGCCCTGCACAATCACTACACCCAGAAGAGCCTGA |
| | | | GCTTAAGCCCTGGAGGAGGAGGAGGCTCTGGAGGAGGAGGCAGCATCT |
| | | | GGGAGCTGAAGAAGGACGTGTACGTGGTGGAGCTGGACTGGTATCCAG |
| | | | ATGCACCAGGAGAGATGGTGGTGCTGACCTGCGACACACCAGAGGAGG |
| | | | ATGGCATCACCTGGACACTGGACCAGAGCTCCGAGGTGCTGGGCAGCG |
| | | | GCAAGACCCTGACAATCCAGGTGAAGGAGTTCGGCGATGCCGGACAGT |
| | | | ACACATGTCACAAGGGCGGCGAGGTGCTGTCTCACAGCCTGCTGCTGCT |
| | | | GCACAAGAAGGAGGATGGCATCTGGAGCACAGACATCCTGAAGGATCA |
| | | | GAAGGAGCCCAAGAACAAGACCTTCCTGAGGTGCGAGGCCAAGAATTA |
| | | | TAGCGGCAGATTCACCTGTTGGTGGCTGACCACAATCTCCACCGACCTG |
| | | | ACATTTTCTGTGAAGTCTAGCAGGGGCTCCTCTGATCCTCAGGGAGTGA |
| | | | CATGCGGAGCCGCCACCCTGTCTGCCGAGCGGGTGAGAGGCGACAACA |
| | | | AGGAGTACGAGTATTCTGTGGAGTGCCAGGAGGATAGCGCCTGTCCCG |
| | | | CCGCCGAGGAGTCCCTGCCTATCGAAGTGATGGTGGACGCCGTGCACA |
| | | | AGCTGAAGTACGAGAATTATACAAGCTCCTTCTTTATCCGGGACATCAT |
| | | | CAAGCCAGATCCCCCTAAGAACCTGCAGCTGAAGCCCCTGAAGAATAG |
| | | | CAGACAGGTGGAGGTGTCCTGGGAGTACCCTGATACCTGGTCCACACC |
| | | | ACACAGCTATTTCTCCCTGACCTTTTGCGTGCAGGTGCAGGGCAAGTCC |
| | | | AAGCGGGAGAAGAAGGACAGAGTGTTCACCGATAAGACATCTGCCACC |
| | | | GTGATCTGTCGGAAGAACGCCTCCATCTCTGTGAGGGCCCAGGACCGCT |
| | | | ACTATTCTAGCTCCTGGTCTGAGTGGGCCAGCGTGCCCTGTTCC |
| 114 | 17945 | Full nt | GAGCCAAAGAGCTCCGACAAGACCCACACATGCCCCCCTTGTCCGGCG |
| | | | CCAGAGGCTGCAGGAGGACCAAGCGTGTTCCTGTTTCCACCCAAGCCTA |
| | | | AAGACACACTGATGATTTCCCGAACCCCCGAAGTCACATGCGTGGTCGT |
| | | | GTCTGTGAGTCACGAGGACCCTGAAGTCAAGTTCAACTGGTACGTGGAT |
| | | | GGCGTCGAGGTGCATAATGCCAAGACTAAACCTAGGGAGGAACAGTAC |
| | | | AACTCAACCTATCGCGTCGTGAGCGTCCTGACAGTGCTGCACCAGGATT |
| | | | GGCTGAACGGCAAAGAATATAAGTGCAAAGTGAGCAATAAGGCCCTGC |
| | | | CCGCTCCTATCGAGAAAACCATTTCCAAGGCTAAAGGGCAGCCTCGCG |
| | | | AACCCCAGGTGTACGTGTATCCCCCTTCTCGGGACGAGCTGACCAAGAA |
| | | | CCAGGTGAGCCTGACATGCCTGGTGAAGGGCTTCTACCCATCCGATATC |
| | | | GCCGTGGAGTGGGAGTCTAATGGCCAGCCCGAGAACAATTATAAGACC |
| | | | ACACCACCCGTGCTGGACTCCGATGGCTCTTTCGCCCTGGTGTCTAAGC |
| | | | TGACCGTGGACAAGAGCAGGTGGCAGCAGGGCAACGTGTTTTCCTGCT |
| | | | CTGTGATGCACGAGGCCCTGCACAATCACTACACCCAGAAGAGCCTGA |
| | | | GCTTAAGCCCAGGAGGCTCCGCCGATGGAGGAATCTGGGAGCTGAAGA |
| | | | AGGACGTGTACGTGGTGGAGCTGGACTGGTATCCAGATGCACCAGGAG |
| | | | AGATGGTGGTGCTGACCTGCGACACACCCGAGGAGGATGGCATCACCT |
| | | | GGACACTGGATCAGAGCTCCGAGGTGCTGGGCAGCGGCAAGACCCTGA |
| | | | CAATCCAGGTGAAGGAGTTCGGCGACGCCGGACAGTACACATGTCACA |
| | | | AGGGCGGCGAGGTGCTGTCCCACTCTCTGCTGCTGCTGCACAAGAAGG |
| | | | AGGACGGCATCTGGTCTACAGACATCCTGAAGGATCAGAAGGAGCCTA |
| | | | AGAACAAGACCTTCCTGCGGTGCGAGGCCAAGAATTATAGCGGCAGAT |
| | | | TCACCTGTTGGTGGCTGACCACAATCAGCACCGATCTGACATTTTCCGT |
| | | | GAAGTCTAGCAGGGGCTCCTCTGACCCACAGGGAGTGACATGCGGAGC |
| | | | CGCCACCCTGTCCGCCGAGCGGGTGAGAGGCGATAACAAGGAGTACGA |
| | | | GTATTCCGTGGAGTGCCAGGAGGACTCTGCCTGTCCCGCCGCCGAGGAG |
| | | | AGCCTGCCTATCGAAGTGATGGTGGATGCCGTGCACAAGCTGAAGTAC |
| | | | GAGAATTATACAAGCTCCTTCTTTATCAGGGACATCATCAAGCCAGATC |
| | | | CCCCTAAGAACCTGCAGCTGAAGCCCCTGAAGAACAGCAGACAGGTGG |
| | | | AGGTGAGCTGGGAGTACCCTGACACCTGGTCCACACCACACTCTTATTT |
| | | | CAGCCTGACCTTTTGCGTGCAGGTGCAGGGCAAGTCTAAGAGGGAGAA |
| | | | GAAGGACCGCGTGTTCACCGATAAGACAAGCGCCACCGTGATCTGTAG |
| | | | AAAGAACGCCAGCATCTCCGTGAGGGCCCAGGATCGCTACTATTCTAGC |
| | | | TCCTGGTCCGAGTGGGCCTCTGTGCCCTGCAGCGGAGGAGGAGGCTCCG |
| | | | GAGGAGGAGGCTCTGGCGGCGGCGGCAGCGGAGGCGGCGGCTCCCGG |
| | | | GCCGTGCCAGGAGGCTCTAGCCCCGCCTGGACACAGTGCCAGCAGCTG |
| | | | AGCCAGAAGCTGTGCACCCTGGCCTGGTCCGCCCACCCTCTGGTGGGAC |
| | | | ACATGGACCTGAGAGAGGAGGGCGATGAGGAGACCACAAACGACGTG |
| | | | CCTCACATCCAGTGCGGCGACGGCTGTGATCCACAGGGCCTGAGGGAC |
| | | | AATTCCCAGTTCTGTCTGCAGCGCATCCACCAGGGCCTGATCTTCTACG |
| | | | AGAAGCTGCTGGGCTCTGATATCTTTACAGGCGAGCCCTCTCTGCTGCC |
| | | | TGACAGCCCAGTGGGACAGCTGCACGCCTCCCTGCTGGGCCTGTCTCAG |
| | | | CTGCTGCAGCCAGAGGGACACCACTGGGAGACCCAGCAGATCCCTTCT |
| | | | CTGAGCCCATCCCAGCCTTGGCAGCGGCTGCTGCTGCGGTTCAAGATCC |
| | | | TGCGGAGCCTGCAGGCCTTCGTGGCAGTGGCAGCAAGAGTGTTTGCAC |
| | | | ATGGAGCCGCCACCCTGTCCCCC |
| 115 | 18939 | Full nt | CAGGTGCAGCTGGTGGAGTCCGGCGGCGGCGTGGTGCAGCCAGGCCGG |
| | | | TCCCTGAGACTGTCTTGCGCAGCCAGCGGCTTCACCTTCAGCTCCTACG |
| | | | GCATGCACTGGGTGCGGCAGGCCCCCGGCAAGGGACTGGAGTGGGTGG |
| | | | CCTTCATCAGATATGACGGCAGCAACAAGTACTATGCCGATTCCGTGAA |
| | | | GGGCAGGTTTACCATCTCCCGCGACAACTCTAAGAATACACTGTACCTG |
| | | | CAGATGAACTCTCTGCGGGCCGAGGACACCGCCGTGTACTATTGTAAGA |
| | | | CACACGGCAGCCACGATAATTGGGGCCAGGGCACCATGGTGACAGTGT |
| | | | CTAGCGCTAGCACTAAGGGGCCTTCAGTGTTTCCACTGGCACCCAGTTC |
| | | | AAAATCAACAAGCGGAGGAACTGCCGCTCTGGGATGTCTGGTGAAGGA |
| | | | CTATTTCCCAGAGCCAGTCACCGTGAGCTGGAACTCCGGCGCACTGACT |
| | | | TCCGGAGTCCACACCTTTCCAGCCGTGCTGCAGAGCTCCGGACTGTACT |
| | | | CTCTGTCTAGTGTGGTCACAGTGCCTTCAAGCTCCCTGGGCACCCAGAC |
| | | | ATATATCTGCAACGTGAATCACAAGCCTAGTAATACTAAGGTCGACAA |
| | | | ACGCGTGGAACCAAAGAGCTGTGATAAAACTCATACCTGCCCCCCTTGT |
| | | | CCGGCGCCAGAGGCAGCAGGAGGACCAAGCGTGTTCCTGTTTCCACCC |
| | | | AAGCCCAAAGACACCCTGATGATTAGCCGAACCCCTGAAGTCACATGC |
| | | | GTGGTCGTGTCCGTGTCTCACGAGGACCCAGAAGTCAAGTTCAACTGGT |
| | | | ACGTGGATGGCGTCGAGGTGCATAATGCCAAGACAAAACCCCGGGAGG |
| | | | AACAGTACAACAGCACCTATAGAGTCGTGTCCGTCCTGACAGTGCTGCA |
| | | | CCAGGATTGGCTGAACGGCAAGGAATATAAGTGCAAAGTGTCCAATAA |
| | | | GGCCCTGCCCGCTCCTATCGAGAAAACCATTTCTAAGGCAAAAGGCCA |
| | | | GCCTCGCGAACCACAGGTCTACGTGCTGCCTCCATCCCGGGACGAGCTG |
| | | | ACAAAGAACCAGGTCTCTCTGCTGTGCCTGGTGAAAGGCTTCTATCCAT |
| | | | CAGATATTGCTGTGGAGTGGGAAAGCAATGGGCAGCCCGAGAACAATT |
| | | | ACCTGACTTGGCCCCCTGTGCTGGACTCTGATGGGAGTTTCTTTCTGTAT |
| | | | TCTAAGCTGACCGTGGATAAAAGTAGGTGGCAGCAGGGAAATGTCTTT |
| | | | AGTTGTTCAGTGATGCATGAAGCCCTGCATAACCACTACACCCAGAAAA |
| | | | GCCTGTCCCTGTCCCCCGGA |
| 116 | 18940 | Full nt | CAGTCCGTGCTGACCCAGCCACCTAGCGTGTCCGGAGCCCCCGGCCAGA |
| | | | GGGTGACAATCTCTTGCAGCGGCTCCCGCTCTAACATCGGCTCTAATAC |
| | | | CGTGAAGTGGTACCAGCAGCTGCCAGGCACAGCCCCCAAGCTGCTGAT |
| | | | CTACTATAACGACCAGCGGCCTAGCGGCGTGCCAGATAGATTCAGCGG |
| | | | CTCCAAGTCTGGCACCAGCGCCTCCCTGGCCATCACAGGACTGCAGGCA |
| | | | GAGGACGAGGCAGATTACTATTGTCAGTCTTACGACCGGTATACCCACC |
| | | | CCGCCCTGCTGTTTGGAACCGGAACAAAGGTGACAGTGCTGGGCCAGC |
| | | | CTAAGGCGGCGCCCAGCGTGACTCTGTTTCCACCCAGCTCCGAGGAACT |
| | | | GCAGGCCAATAAGGCTACCCTGGTCTGTCTGATTTCCGACTTCTACCCC |
| | | | GGGGCTGTGACAGTCGCATGGAAGGCCGATTCTAGTCCTGTGAAAGCA |
| | | | GGAGTCGAGACCACAACTCCATCAAAGCAGAGCAACAACAAGTACGCA |
| | | | GCCTCAAGCTATCTGTCTCTGACACCTGAACAGTGGAAAAGCCACCGGT |
| | | | CTTATAGTTGTCAGGTGACTCACGAGGGCTCAACAGTGGAAAAGACAG |
| | | | TCGCACCCGCAGAATGCTCA |
| 117 | 18942 | Full nt | CAGGTGCAGCTGGTGGAGAGCGGCGGCGGCGTGGTGCAGCCTGGCCGG |
| | | | TCCCTGAGACTGTCTTGCGCAGCCAGCGGCTTCACCTTTAGCTCCTACG |
| | | | GCATGCACTGGGTGCGGCAGGCCCCTGGCAAGGGACTGGAGTGGGTGG |
| | | | CCTTCATCAGATATGACGGCTCTAACAAGTACTATGCCGATAGCGTGAA |
| | | | GGGCAGGTTTACCATCTCCCGCGACAACTCTAAGAATACACTGTACCTG |
| | | | CAGATGAACTCCCTGCGGGCAGAGGACACCGCCGTGTACTATTGCAAG |
| | | | ACACACGGCTCTCACGATAATTGGGGCCAGGGCACCATGGTGACAGTG |
| | | | TCTAGCGGAGGAGGAGGCAGCGGAGGAGGAGGCTCCGGCGGCGGCGG |
| | | | CAGCCAGTCCGTGCTGACCCAGCCACCTTCTGTGAGCGGAGCCCCCGGA |
| | | | CAGAGGGTGACAATCTCCTGTTCTGGCAGCCGCTCCAACATCGGCAGCA |
| | | | ATACCGTGAAGTGGTATCAGCAGCTGCCTGGCACAGCCCCAAAGCTGCT |
| | | | GATCTACTATAATGACCAGAGACCCTCCGGCGTGCCTGATAGATTCTCT |
| | | | GGCAGCAAGTCCGGCACCTCTGCCAGCCTGGCCATCACAGGACTGCAG |
| | | | GCAGAGGACGAGGCAGATTACTATTGTCAGTCCTACGACAGATATACC |
| | | | CACCCAGCCCTGCTGTTTGGCACCGGCACAAAGGTGACAGTGCTGGCCG |
| | | | CCGAGCCCAAGTCCTCTGATAAGACCCACACATGCCCACCCTGTCCGGC |
| | | | GCCAGAGGCAGCAGGAGGACCAAGCGTGTTCCTGTTTCCACCCAAGCC |
| | | | CAAAGACACCCTGATGATTAGCCGAACCCCTGAAGTCACATGCGTGGTC |
| | | | GTGTCCGTGTCTCACGAGGACCCAGAAGTCAAGTTCAACTGGTACGTGG |
| | | | ATGGCGTCGAGGTGCATAATGCCAAGACAAAACCCCGGGAGGAACAGT |
| | | | ACAACAGCACCTATAGAGTCGTGTCCGTCCTGACAGTGCTGCACCAGGA |
| | | | TTGGCTGAACGGCAAGGAATATAAGTGCAAAGTGTCCAATAAGGCCCT |
| | | | GCCCGCTCCTATCGAGAAAACCATTTCTAAGGCAAAAGGCCAGCCTCGC |
| | | | GAACCACAGGTCTACGTGCTGCCTCCATCCCGGGACGAGCTGACAAAG |
| | | | AACCAGGTCTCTCTGCTGTGCCTGGTGAAAGGCTTCTATCCATCAGATA |
| | | | TTGCTGTGGAGTGGGAAAGCAATGGGCAGCCCGAGAACAATTACCTGA |
| | | | CTTGGCCCCCTGTGCTGGACTCTGATGGGAGTTTCTTTCTGTATTCTAAG |
| | | | CTGACCGTGGATAAAAGTAGGTGGCAGCAGGGAAATGTCTTTAGTTGTT |
| | | | CAGTGATGCATGAAGCCCTGCATAACCACTACACCCAGAAAAGCCTGT |
| | | | CCCTGTCCCCCGGA |
| 118 | 18943 | Full nt | CAGTCCGTGCTGACCCAGCCACCTAGCGTGTCCGGAGCCCCCGGCCAGA |
| | | | GGGTGACAATCTCTTGCAGCGGCTCCCGCTCTAACATCGGCTCTAATAC |
| | | | CGTGAAGTGGTACCAGCAGCTGCCTGGCACAGCCCCAAAGCTGCTGAT |
| | | | CTACTATAACGACCAGAGACCCAGCGGCGTGCCTGATAGATTCAGCGG |
| | | | CTCCAAGTCTGGCACCAGCGCCTCCCTGGCCATCACAGGACTGCAGGCA |
| | | | GAGGACGAGGCAGATTACTATTGCCAGTCCTACGACCGGTATACCCACC |
| | | | CTGCCCTGCTGTTTGGCACCGGCACAAAGGTGACAGTGCTGGGCGGAG |
| | | | GAGGCTCCGGAGGAGGAGGCTCTGGCGGCGGCGGCAGCCAGGTGCAGC |
| | | | TGGTGGAGAGCGGCGGCGGCGTGGTGCAGCCAGGCCGGTCTCTGAGAC |
| | | | TGAGCTGTGCCGCCTCCGGCTTCACCTTTAGCTCCTACGGCATGCACTG |
| | | | GGTGCGGCAGGCCCCCGGCAAGGGACTGGAGTGGGTGGCCTTCATCAG |
| | | | ATATGACGGCTCCAATAAGTACTATGCCGATTCTGTGAAGGGCAGGTTT |
| | | | ACCATCAGCCGGGACAACAGCAAGAATACACTGTATCTGCAGATGAAC |
| | | | AGCCTGAGAGCCGAGGACACCGCCGTGTACTATTGTAAGACACACGGC |
| | | | TCCCACGATAATTGGGGCCAGGGCACCATGGTGACAGTGTCTAGCGCC |
| | | | GCCGAGCCCAAGTCCTCTGATAAGACCCACACATGCCCACCCTGTCCGG |
| | | | CGCCAGAGGCAGCAGGAGGACCAAGCGTGTTCCTGTTTCCACCCAAGC |
| | | | CCAAAGACACCCTGATGATTAGCCGAACCCCTGAAGTCACATGCGTGGT |
| | | | CGTGTCCGTGTCTCACGAGGACCCAGAAGTCAAGTTCAACTGGTACGTG |
| | | | GATGGCGTCGAGGTGCATAATGCCAAGACAAAACCCCGGGAGGAACAG |
| | | | TACAACAGCACCTATAGAGTCGTGTCCGTCCTGACAGTGCTGCACCAGG |
| | | | ATTGGCTGAACGGCAAGGAATATAAGTGCAAAGTGTCCAATAAGGCCC |
| | | | TGCCCGCTCCTATCGAGAAAACCATTTCTAAGGCAAAAGGCCAGCCTCG |
| | | | CGAACCACAGGTCTACGTGCTGCCTCCATCCCGGGACGAGCTGACAAA |
| | | | GAACCAGGTCTCTCTGCTGTGCCTGGTGAAAGGCTTCTATCCATCAGAT |
| | | | ATTGCTGTGGAGTGGGAAAGCAATGGGCAGCCCGAGAACAATTACCTG |
| | | | ACTTGGCCCCCTGTGCTGGACTCTGATGGGAGTTTCTTTCTGTATTCTAA |
| | | | GCTGACCGTGGATAAAAGTAGGTGGCAGCAGGGAAATGTCTTTAGTTG |
| | | | TTCAGTGATGCATGAAGCCCTGCATAACCACTACACCCAGAAAAGCCTG |
| | | | TCCCTGTCCCCCGGA |
| 119 | 18953 | Full nt | GAGCCAAAGAGCTCCGACAAGACCCACACATGCCCCCCTTGTCCGGCG |
| | | | CCAGAGGCAGCAGGAGGACCAAGCGTGTTCCTGTTTCCACCCAAGCCC |
| | | | AAAGACACCCTGATGATTAGCCGAACCCCTGAAGTCACATGCGTGGTC |
| | | | GTGTCCGTGTCTCACGAGGACCCAGAAGTCAAGTTCAACTGGTACGTGG |
| | | | ATGGCGTCGAGGTGCATAATGCCAAGACAAAACCCCGGGAGGAACAGT |
| | | | ACAACAGCACCTATAGAGTCGTGTCCGTCCTGACAGTGCTGCACCAGGA |
| | | | TTGGCTGAACGGCAAGGAATATAAGTGCAAAGTGTCCAATAAGGCCCT |
| | | | GCCCGCTCCTATCGAGAAAACCATTTCTAAGGCAAAAGGCCAGCCTCGC |
| | | | GAGCCTCAGGTGTACGTGCTGCCACCTTCCCGCGACGAGCTGACCAAGA |
| | | | ATCAGGTGTCTCTGCTGTGCCTGGTGAAGGGCTTCTATCCAAGCGATAT |
| | | | CGCAGTGGAGTGGGAGTCCAACGGACAGCCCGAGAACAATTACCTGAC |
| | | | CTGGCCACCCGTGCTGGACAGCGATGGCTCCTTCTTTCTGTATTCCAAG |
| | | | CTGACAGTGGACAAGTCTAGATGGCAGCAGGGCAACGTGTTCAGCTGT |
| | | | TCCGTGATGCACGAGGCCCTGCACAACCACTACACCCAGAAGTCTCTGA |
| | | | GCTTAAGCCCAGGAGGAGGAGGAGGCTCTCTGAGCGGCAGGAGCGATA |
| | | | ATCATGGAGGAGGAGGCAGCGGAGGAGGAGGCTCCGGAGGCGGCGGC |
| | | | TCTGGCGGCGGCGGCAGCAAGATCGACGCCTGCAAGCGCGGCGATGTG |
| | | | ACAGTGAAGCCTAGCCACGTGATCCTGCTGGGCTCCACCGTGAATATCA |
| | | | CATGCTCTCTGAAGCCACGGCAGGGCTGTTTCCACTACTCCCGGAGAAA |
| | | | CAAGCTGATCCTGTATAAGTTCGACAGGCGCATCAACTTTCACCACGGC |
| | | | CACTCTCTGAATAGCCAGGTGACCGGACTGCCACTGGGCACCACACTGT |
| | | | TCGTGTGCAAGCTGGCCTGTATCAATAGCGATGAGATCCAGATCTGTGG |
| | | | AGCCGAGATCTTTGTGGGAGTGGCCCCCGAGCAGCCTCAGAACCTGTCC |
| | | | TGCATCCAGAAGGGAGAGCAGGGAACCGTGGCATGTACATGGGAGCGG |
| | | | GGCAGAGACACCCACCTGTACACCGAGTATACACTGCAGCTGAGCGGC |
| | | | CCCAAGAACCTGACATGGCAGAAGCAGTGCAAGGATATCTACTGTGAC |
| | | | TATCTGGATTTCGGCATCAACCTGACCCCAGAGTCCCCCGAGTCTAACT |
| | | | TCACCGCCAAGGTGACAGCCGTGAACTCTCTGGGCAGCTCCTCTAGCCT |
| | | | GCCCAGCACCTTCACATTTCTGGACATCGTGCGCCCTCTGCCTCCATGG |
| | | | GATATCCGGATCAAGTTTCAGAAGGCCTCCGTGTCTAGATGCACACTGT |
| | | | ACTGGAGGGACGAGGGCCTGGTGCTGCTGAACAGGCTGCGCTATAGAC |
| | | | CCAGCAATTCCAGACTGTGGAACATGGTGAATGTGACCAAGGCCAAGG |
| | | | GCAGGCACGACCTGCTGGATCTGAAGCCTTTCACAGAGTACGAGTTTCA |
| | | | GATCTCCTCTAAGCTGCACCTGTATAAGGGCTCTTGGAGCGATTGGTCC |
| | | | GAGTCTCTGAGGGCACAGACCCCTGAGGAGGAGCCA |
| 120 | 18954 | Full nt | AAGATCGACGCCTGCAAGCGGGGCGATGTGACAGTGAAGCCATCCCAC |
| | | | GTGATCCTGCTGGGCTCTACCGTGAATATCACATGCAGCCTGAAGCCAC |
| | | | GGCAGGGCTGTTTTCACTACTCCCGGAGAAACAAGCTGATCCTGTATAA |
| | | | GTTCGACAGGCGCATCAACTTTCACCACGGCCACAGCCTGAACAGCCA |
| | | | GGTGACCGGACTGCCCCTGGGCACCACACTGTTCGTGTGCAAGCTGGCC |
| | | | TGTATCAATTCTGATGAGATCCAGATCTGTGGAGCCGAGATCTTTGTGG |
| | | | GCGTGGCCCCTGAGCAGCCACAGAACCTGAGCTGCATCCAGAAGGGAG |
| | | | AGCAGGGAACCGTGGCATGTACATGGGAGCGGGGCAGAGACACCCACC |
| | | | TGTACACCGAGTATACACTGCAGCTGAGCGGCCCTAAGAATCTGACATG |
| | | | GCAGAAGCAGTGCAAGGATATCTACTGTGACTATCTGGATTTCGGCATC |
| | | | AACCTGACCCCCGAGTCTCCTGAGAGCAACTTCACCGCCAAGGTGACA |
| | | | GCCGTGAACAGCCTGGGCAGCTCCTCTAGCCTGCCTTCCACCTTCACAT |
| | | | TTCTGGACATCGTGAGACCACTGCCCCCTTGGGATATCAGGATCAAGTT |
| | | | CCAGAAGGCCTCTGTGAGCAGATGCACACTGTACTGGAGGGACGAGGG |
| | | | CCTGGTGCTGCTGAACAGGCTGCGCTATAGACCCTCCAATTCTCGCCTG |
| | | | TGGAACATGGTGAATGTGACCAAGGCCAAGGGCAGACACGACCTGCTG |
| | | | GATCTGAAGCCTTTCACAGAGTACGAGTTTCAGATCTCCTCTAAGCTGC |
| | | | ACCTGTATAAGGGCAGCTGGTCCGATTGGTCTGAGAGCCTGAGAGCCC |
| | | | AGACCCCAGAGGAGGAGCCAGGAGGAGGAGGCTCCGGCGGAGGAGGC |
| | | | TCCCTGTCTGGCAGGTCCGACAACCACGGAGGAGGAGGCTCTGAGCCC |
| | | | AAGAGCTCCGATAAGACCCACACATGCCCACCCTGTCCGGCGCCAGAG |
| | | | GCAGCAGGAGGACCAAGCGTGTTCCTGTTTCCACCCAAGCCCAAAGAC |
| | | | ACCCTGATGATTAGCCGAACCCCTGAAGTCACATGCGTGGTCGTGTCCG |
| | | | TGTCTCACGAGGACCCAGAAGTCAAGTTCAACTGGTACGTGGATGGCGT |
| | | | CGAGGTGCATAATGCCAAGACAAAACCCCGGGAGGAACAGTACAACAG |
| | | | CACCTATAGAGTCGTGTCCGTCCTGACAGTGCTGCACCAGGATTGGCTG |
| | | | AACGGCAAGGAATATAAGTGCAAAGTGTCCAATAAGGCCCTGCCCGCT |
| | | | CCTATCGAGAAAACCATTTCTAAGGCAAAAGGCCAGCCTCGCGAACCA |
| | | | CAGGTCTACGTGCTGCCTCCATCCCGGGACGAGCTGACAAAGAACCAG |
| | | | GTCTCTCTGCTGTGCCTGGTGAAAGGCTTCTATCCATCAGATATTGCTGT |
| | | | GGAGTGGGAAAGCAATGGGCAGCCCGAGAACAATTACCTGACTTGGCC |
| | | | CCCTGTGCTGGACTCTGATGGGAGTTTCTTTCTGTATTCTAAGCTGACCG |
| | | | TGGATAAAAGTAGGTGGCAGCAGGGAAATGTCTTTAGTTGTTCAGTGAT |
| | | | GCATGAAGCCCTGCATAACCACTACACCCAGAAAAGCCTGTCCCTGTCC |
| | | | CCCGGA |
| 121 | 18956 | Full nt | AAGATCGACGCATGCAAGAGGGGCGATGTGACAGTGAAGCCTTCTCAC |
| | | | GTGATCCTGCTGGGCAGCACCGTGAACATCACATGCTCCCTGAAGCCCA |
| | | | GACAGGGCTGTTTTCACTACTCCCGGAGAAATAAGCTGATCCTGTATAA |
| | | | GTTCGATAGGCGCATCAACTTTCACCACGGCCACTCTCTGAATAGCCAG |
| | | | GTGACCGGACTGCCTCTGGGCACCACACTGTTCGTGTGCAAGCTGGCCT |
| | | | GTATCAACTCTGACGAGATCCAGATCTGTGGAGCCGAGATCTTTGTGGG |
| | | | CGTGGCCCCAGGAGGAGGAGGCAGCGGAGGAGGCGGCAGCCTGAGCG |
| | | | GCAGAAGCGATAACCATGGAGGAGGAGGCAGCAGAAATCTGCCAGTG |
| | | | GCCACACCAGACCCCGGAATGTTCCCTTGCCTGCACCACTCCCAGAACC |
| | | | TGCTGAGGGCCGTGTCTAATATGCTGCAGAAGGCCCGCCAGACCCTGG |
| | | | AGTTTTACCCATGTACAAGCGAGGAGATCGACCACGAGGATATCACCA |
| | | | AGGATAAGACCTCCACAGTGGAGGCATGCCTGCCACTGGAGCTGACAA |
| | | | AGAACGAGTCCTGTCTGAACAGCCGGGAGACCAGCTTCATCACAAACG |
| | | | GCTCCTGCCTGGCCTCTAGAAAGACCAGCTTTATGATGGCCCTGTGCCT |
| | | | GAGCTCCATCTACGAGGACCTGAAGATGTATCAGGTGGAGTTCAAGAC |
| | | | AATGAACGCCAAGCTGCTGATGGACCCCAAGCGGCAGATCTTTCTGGAT |
| | | | CAGAATATGCTGGCCGTGATCGACGAGCTGATGCAGGCCCTGAACTTCA |
| | | | ATAGCGAGACCGTGCCTCAGAAGTCTAGCCTGGAGGAGCCAGATTTCT |
| | | | ACAAGACAAAGATCAAGCTGTGCATCCTGCTGCACGCCTTTCGGATCAG |
| | | | AGCCGTGACCATCGACAGAGTGATGTCCTACCTGAACGCCAGCGGCGG |
| | | | CGGCGGCAGCGGCGGAGGCGGCTCCGAGCCTAAGTCCTCTGATAAGAC |
| | | | CCACACATGCCCCCCTTGTCCGGCGCCAGAGGCTGCAGGAGGACCAAG |
| | | | CGTGTTCCTGTTTCCACCCAAGCCTAAAGACACACTGATGATTTCCCGA |
| | | | ACCCCCGAAGTCACATGCGTGGTCGTGTCTGTGAGTCACGAGGACCCTG |
| | | | AAGTCAAGTTCAACTGGTACGTGGATGGCGTCGAGGTGCATAATGCCA |
| | | | AGACTAAACCTAGGGAGGAACAGTACAACTCAACCTATCGCGTCGTGA |
| | | | GCGTCCTGACAGTGCTGCACCAGGATTGGCTGAACGGCAAAGAATATA |
| | | | AGTGCAAAGTGAGCAATAAGGCCCTGCCCGCTCCTATCGAGAAAACCA |
| | | | TTTCCAAGGCTAAAGGGCAGCCTCGCGAACCACAGGTCTACGTGTATCC |
| | | | TCCAAGCCGGGACGAGCTGACAAAGAACCAGGTCTCCCTGACTTGTCTG |
| | | | GTGAAAGGGTTTTACCCTAGTGATATCGCTGTGGAGTGGGAATCAAATG |
| | | | GACAGCCAGAGAACAATTATAAGACTACCCCCCCTGTGCTGGACAGTG |
| | | | ATGGGTCATTCGCACTGGTCTCCAAGCTGACAGTGGACAAATCTCGGTG |
| | | | GCAGCAGGGAAATGTCTTTTCATGTAGCGTGATGCATGAAGCACTGCAC |
| | | | AACCATTACACCCAGAAGTCACTGTCACTGTCACCAGGA |
| 122 | 18957 | Full nt | GAGCCAAAGAGCTCCGACAAGACCCACACATGCCCCCCTTGTCCGGCG |
| | | | CCAGAGGCTGCAGGAGGACCAAGCGTGTTCCTGTTTCCACCCAAGCCTA |
| | | | AAGACACACTGATGATTTCCCGAACCCCCGAAGTCACATGCGTGGTCGT |
| | | | GTCTGTGAGTCACGAGGACCCTGAAGTCAAGTTCAACTGGTACGTGGAT |
| | | | GGCGTCGAGGTGCATAATGCCAAGACTAAACCTAGGGAGGAACAGTAC |
| | | | AACTCAACCTATCGCGTCGTGAGCGTCCTGACAGTGCTGCACCAGGATT |
| | | | GGCTGAACGGCAAAGAATATAAGTGCAAAGTGAGCAATAAGGCCCTGC |
| | | | CCGCTCCTATCGAGAAAACCATTTCCAAGGCTAAAGGGCAGCCTCGCG |
| | | | AACCTCAGGTGTACGTGTATCCACCCTCCCGCGATGAGCTGACAAAGAA |
| | | | CCAGGTGTCTCTGACCTGTCTGGTGAAGGGCTTTTACCCTAGCGACATC |
| | | | GCCGTGGAGTGGGAGTCCAATGGCCAGCCAGAGAACAATTATAAGACC |
| | | | ACACCTCCAGTGCTGGACTCTGATGGCAGCTTCGCCCTGGTGTCTAAGC |
| | | | TGACAGTGGACAAGAGCAGATGGCAGCAGGGCAACGTGTTTTCTTGTA |
| | | | GCGTGATGCACGAGGCCCTGCACAATCACTACACCCAGAAGTCCCTGA |
| | | | GCTTAAGCCCCGGAGGGTCTGCTGATGGGGGCATTTGGGAACTGAAGA |
| | | | AAGATGTCTATGTCGTGGAGCTGGACTGGTATCCTGACGCACCTGGGGA |
| | | | GATGGTGGTGCTGACCTGCGACACACCTGAGGAGGATGGCATCACCTG |
| | | | GACACTGGATCAGAGCTCCGAGGTGCTGGGCAGCGGCAAGACCCTGAC |
| | | | AATCCAGGTGAAGGAGTTCGGCGACGCCGGACAGTACACCTGTCACAA |
| | | | GGGAGGAGAGGTGCTGAGCCACTCCCTGCTGCTGCTGCACAAGAAGGA |
| | | | GGACGGCATCTGGTCTACAGACATCCTGAAGGATCAGAAGGAGCCCAA |
| | | | GAACAAGACCTTCCTGCGGTGCGAGGCCAAGAATTATAGCGGCAGATT |
| | | | CACCTGTTGGTGGCTGACCACAATCTCTACCGACCTGACCTTCAGCGTG |
| | | | AAGTCTAGCAGGGGCTCCTCTGACCCTCAGGGAGTGACATGCGGAGCC |
| | | | GCCACCCTGAGCGCCGAGCGGGTGAGAGGCGATAACAAGGAGTACGAG |
| | | | TATAGCGTGGAGTGCCAGGAGGACTCCGCCTGTCCCGCCGCCGAGGAG |
| | | | TCCCTGCCTATCGAAGTGATGGTGGATGCCGTGCACAAGCTGAAGTACG |
| | | | AGAATTATACAAGCTCCTTCTTTATCCGGGACATCATCAAGCCTGATCC |
| | | | CCCTAAGAACCTGCAGCTGAAGCCCCTGAAGAACAGCAGACAGGTGGA |
| | | | GGTGTCTTGGGAGTACCCTGACACCTGGTCCACACCACACAGCTATTTC |
| | | | TCCCTGACCTTTTGCGTGCAGGTGCAGGGCAAGTCCAAGAGGGAGAAG |
| | | | AAGGACCGCGTGTTCACCGATAAGACATCTGCCACCGTGATCTGTCGGA |
| | | | AGAACGCCTCTATCAGCGTGCGGGCCCAGGATAGATACTATTCTAGCTC |
| | | | CTGGTCCGAGTGGGCCTCTGTGCCATGCAGTGGAGGAGGAGGCTCCGG |
| | | | AGGAGGAGGCTCTGGAGGAGGAGGCAGCAGAAATCTGCCAGTGGCCAC |
| | | | CCCAGACCCCGGAATGTTCCCTTGCCTGCACCACTCTCAGAACCTGCTG |
| | | | AGGGCCGTGAGCAATATGCTGCAGAAGGCCCGCCAGACACTGGAGTTT |
| | | | TACCCTTGTACCAGCGAGGAGATCGACCACGAGGATATCACAAAGGAT |
| | | | AAGACCTCCACAGTGGAGGCCTGCCTGCCACTGGAGCTGACCAAGAAC |
| | | | GAGTCCTGTCTGAACAGCCGGGAGACAAGCTTCATCACCAACGGCTCCT |
| | | | GCCTGGCCTCTAGAAAGACAAGCTTTATGATGGCCCTGTGCCTGAGCAG |
| | | | CATCTACGAGGACCTGAAGATGTATCAGGTGGAGTTCAAGACCATGAA |
| | | | CGCCAAGCTGCTGATGGACCCCAAGCGGCAGATCTTTCTGGATCAGAAT |
| | | | ATGCTGGCCGTGATCGACGAGCTGATGCAGGCCCTGAACTTCAATAGCG |
| | | | AGACAGTGCCACAGAAGTCCTCTCTGGAGGAGCCCGATTTCTACAAGA |
| | | | CCAAGATCAAGCTGTGCATCCTGCTGCACGCCTTCCGGATCAGAGCCGT |
| | | | GACAATCGATAGAGTGATGTCCTATCTGAACGCCTCTGGAGGAGGAGG |
| | | | CTCCCTGTCTGGCCGCAGCGACAATCATGGAGGAGGAGGCAGCGGCGG |
| | | | CGGAGGCTCCAAGATCGACGCCTGTAAGAGGGGCGATGTGACCGTGAA |
| | | | GCCATCTCACGTGATCCTGCTGGGCAGCACAGTGAACATCACCTGCTCC |
| | | | CTGAAGCCCAGACAGGGCTGTTTCCACTACTCCCGGAGAAATAAGCTG |
| | | | ATCCTGTATAAGTTCGACAGGCGCATCAACTTTCACCACGGCCACTCTC |
| | | | TGAATAGCCAGGTGACCGGCCTGCCCCTGGGCACCACACTGTTCGTGTG |
| | | | CAAGCTGGCCTGTATCAATAGTGACGAGATTCAGATTTGTGGGGCAGA |
| | | | GATTTTTGTGGGGGTCGCTCCC |
| 123 | 21415 | Full nt | ATCTGGGAGCTGAAGAAGGACGTGTACGTGGTGGAGCTGGACTGGTAC |
| | | | CCTGATGCCCCAGGCGAGATGGTGGTGCTGACCTGCGACACACCCGAG |
| | | | GAGGATGGCATCACCTGGACACTGGACCAGAGCTCCGAGGTGCTGGGC |
| | | | AGCGGCAAGACCCTGACAATCCAGGTGAAGGAGTTCGGCGATGCCGGA |
| | | | CAGTACACCTGTCACAAGGGAGGAGAGGTGCTGAGCCACTCCCTGCTG |
| | | | CTGCTGCACAAGAAGGAGGATGGCATCTGGTCCACAGACATCCTGAAG |
| | | | GATCAGAAGGAGCCAAAGAACAAGACCTTCCTGCGGTGCGAGGCCAAG |
| | | | AATTATAGCGGCAGATTCACCTGTTGGTGGCTGACCACAATCTCCACCG |
| | | | ACCTGACATTTTCTGTGAAGTCTAGCAGGGGCTCCTCTGATCCCCAGGG |
| | | | AGTGACATGCGGAGCCGCCACCCTGTCCGCCGAGCGGGTGAGAGGCGA |
| | | | CAACAAGGAGTACGAGTATTCTGTGGAGTGCCAGGAGGATAGCGCCTG |
| | | | TCCCGCCGCCGAGGAGAGCCTGCCTATCGAAGTGATGGTGGACGCCGT |
| | | | GCACAAGCTGAAGTACGAGAATTATACAAGCTCCTTCTTTATCCGGGAC |
| | | | ATCATCAAGCCAGATCCCCCTAAGAACCTGCAGCTGAAGCCCCTGAAG |
| | | | AATAGCAGACAGGTGGAGGTGTCCTGGGAGTACCCTGATACCTGGAGC |
| | | | ACACCACACTCCTATTTCTCTCTGACCTTTTGCGTGCAGGTGCAGGGCA |
| | | | AGTCTAAGAGGGAGAAGAAGGACCGCGTGTTTACCGATAAGACAAGCG |
| | | | CCACCGTGATCTGTAGGAAGAACGCCTCTATCAGCGTGCGGGCACAGG |
| | | | ACCGGTACTATTCTAGCTCCTGGAGCGAGTGGGCCTCCGTGCCTTGCTC |
| | | | TGGAGGAGGAGGCAGCGGCGGAGGAGGCTCCATGAGCGGGCGGAGCG |
| | | | CCAACGCAGGGGGCGGCGGCTCTGGCGGCGGCGGCAGCGGAGGCGGC |
| | | | GGCAGCCAGTCCGTGCTGACACAGCCACCATCTGTGAGCGGAGCCCCC |
| | | | GGACAGAGGGTGACCATCTCCTGTTCTGGCAGCCGCTCCAACATCGGCT |
| | | | CCAATACAGTGAAGTGGTATCAGCAGCTGCCAGGAACCGCCCCTAAGC |
| | | | TGCTGATCTACTATAACGACCAGAGGCCAAGCGGAGTGCCAGATCGCTT |
| | | | CTCTGGCAGCAAGTCCGGCACATCTGCCAGCCTGGCCATCACCGGACTG |
| | | | CAGGCAGAGGACGAGGCCGATTACTATTGCCAGTCCTACGATCGGTAT |
| | | | ACACACCCTGCCCTGCTGTTTGGCACCGGCACAAAGGTGACCGTGCTGG |
| | | | GCGGAGGAGGCTCCGGAGGAGGAGGCTCTGGAGGAGGCGGCAGCCAG |
| | | | GTGCAGCTGGTGGAGAGCGGCGGCGGCGTGGTGCAGCCCGGCAGGAGC |
| | | | CTGCGCCTGTCCTGTGCAGCCTCTGGCTTCACCTTTTCTAGCTACGGCAT |
| | | | GCACTGGGTGCGGCAGGCCCCTGGCAAGGGACTGGAGTGGGTGGCCTT |
| | | | CATCAGATATGACGGCTCCAATAAGTACTATGCCGATTCTGTGAAGGGC |
| | | | CGGTTTACAATCAGCAGAGATAACTCCAAGAATACCCTGTACCTGCAGA |
| | | | TGAACTCCCTGAGAGCCGAGGACACAGCCGTGTACTATTGTAAGACCC |
| | | | ACGGCTCTCACGATAATTGGGGCCAGGGCACAATGGTGACCGTGTCCTC |
| | | | T |
| 124 | 21416 | Full nt | GAGCCAAAGAGCTCCGACAAGACCCACACATGCCCCCCTTGTCCGGCG |
| | | | CCAGAGGCTGCAGGAGGACCAAGCGTGTTCCTGTTTCCACCCAAGCCTA |
| | | | AAGACACACTGATGATTTCCCGAACCCCCGAAGTCACATGCGTGGTCGT |
| | | | GTCTGTGAGTCACGAGGACCCTGAAGTCAAGTTCAACTGGTACGTGGAT |
| | | | GGCGTCGAGGTGCATAATGCCAAGACTAAACCTAGGGAGGAACAGTAC |
| | | | AACTCAACCTATCGCGTCGTGAGCGTCCTGACAGTGCTGCACCAGGATT |
| | | | GGCTGAACGGCAAAGAATATAAGTGCAAAGTGAGCAATAAGGCCCTGC |
| | | | CCGCTCCTATCGAGAAAACCATTTCCAAGGCTAAAGGGCAGCCTCGCG |
| | | | AACCTCAGGTGTACGTGTATCCACCCTCCCGCGATGAGCTGACAAAGAA |
| | | | CCAGGTGTCTCTGACCTGTCTGGTGAAGGGCTTTTACCCTAGCGACATC |
| | | | GCCGTGGAGTGGGAGTCCAATGGCCAGCCAGAGAACAATTATAAGACC |
| | | | ACACCTCCAGTGCTGGACTCTGATGGCAGCTTCGCCCTGGTGTCTAAGC |
| | | | TGACAGTGGACAAGAGCAGATGGCAGCAGGGCAACGTGTTTTCTTGTA |
| | | | GCGTGATGCACGAGGCCCTGCACAATCACTACACCCAGAAGTCCCTGA |
| | | | GCTTAAGCCCAGGCCGGAACCTGCCCGTGGCCACCCCAGATCCCGGCAT |
| | | | GTTCCCCTGCCTGCACCACTCTCAGAACCTGCTGAGGGCCGTGAGCAAT |
| | | | ATGCTGCAGAAGGCCCGCCAGACCCTGGAGTTTTACCCCTGTACATCCG |
| | | | AGGAGATCGACCACGAGGATATCACCAAGGACAAGACCTCTACAGTGG |
| | | | AGGCCTGCCTGCCTCTGGAGCTGACAAAGAACGAGTCTTGTCTGAATAG |
| | | | CCGGGAGACCTCCTTCATCACAAATGGCTCTTGCCTGGCCAGCAGAAAG |
| | | | ACCTCCTTTATGATGGCCCTGTGCCTGAGCTCCATCTACGAGGATCTGA |
| | | | AGATGTATCAGGTGGAGTTCAAGACAATGAACGCCAAGCTGCTGATGG |
| | | | ACCCTAAGCGGCAGATCTTTCTGGATCAGAATATGCTGGCCGTGATCGA |
| | | | CGAGCTGATGCAGGCCCTGAACTTCAATAGCGAGACCGTGCCTCAGAA |
| | | | GTCTAGCCTGGAGGAGCCAGATTTCTACAAGACAAAGATCAAGCTGTG |
| | | | CATCCTGCTGCACGCCTTTCGGATCAGAGCCGTGACCATCGACAGAGTG |
| | | | ATGTCCTATCTGAACGCCTCTGGAGGAGGAGGCAGCGGAGGAGGCGGC |
| | | | TCTATGAGCGGGCGGAGCGCCAACGCAGGGGGAGGAGGCTCCGGCGGA |
| | | | GGAGGCTCTGGCGGCGGCGGCTCCCAGTCTGTGCTGACCCAGCCACCTA |
| | | | GCGTGTCCGGAGCCCCCGGCCAGCGGGTGACAATCTCTTGTAGCGGCTC |
| | | | CAGATCTAACATCGGCAGCAATACCGTGAAGTGGTATCAGCAGCTGCCT |
| | | | GGCACAGCCCCAAAGCTGCTGATCTACTATAACGATCAGAGGCCCTCCG |
| | | | GCGTGCCTGACCGCTTCAGCGGCTCCAAGTCTGGCACCAGCGCCTCCCT |
| | | | GGCCATCACAGGCCTGCAGGCAGAGGACGAGGCAGATTACTATTGCCA |
| | | | GAGCTACGATAGGTATACCCACCCAGCCCTGCTGTTTGGCACCGGCACA |
| | | | AAGGTGACAGTGCTGGGCGGCGGCGGCAGCGGAGGAGGAGGCTCCGG |
| | | | AGGCGGCGGCTCTCAGGTGCAGCTGGTGGAGTCCGGAGGAGGAGTGGT |
| | | | GCAGCCAGGCAGGTCTCTGCGCCTGAGCTGTGCAGCCTCCGGCTTCACC |
| | | | TTTTCCTCTTACGGCATGCACTGGGTGAGGCAGGCCCCCGGCAAGGGAC |
| | | | TGGAGTGGGTGGCCTTCATCCGCTATGATGGCAGCAATAAGTACTATGC |
| | | | CGACTCCGTGAAGGGCCGGTTTACCATCTCTAGAGACAACAGCAAGAA |
| | | | TACACTGTATCTGCAGATGAACAGCCTGCGCGCCGAGGATACCGCCGTG |
| | | | TACTATTGCAAGACACACGGCTCCCACGACAATTGGGGCCAGGGCACC |
| | | | ATGGTGACAGTGAGCTCC |
| 125 | 21417 | Full nt | GAGCCAAAGAGCTCCGACAAGACCCACACATGCCCCCCTTGTCCGGCG |
| | | | CCAGAGGCAGCAGGAGGACCAAGCGTGTTCCTGTTTCCACCCAAGCCC |
| | | | AAAGACACCCTGATGATTAGCCGAACCCCTGAAGTCACATGCGTGGTC |
| | | | GTGTCCGTGTCTCACGAGGACCCAGAAGTCAAGTTCAACTGGTACGTGG |
| | | | ATGGCGTCGAGGTGCATAATGCCAAGACAAAACCCCGGGAGGAACAGT |
| | | | ACAACAGCACCTATAGAGTCGTGTCCGTCCTGACAGTGCTGCACCAGGA |
| | | | TTGGCTGAACGGCAAGGAATATAAGTGCAAAGTGTCCAATAAGGCCCT |
| | | | GCCCGCTCCTATCGAGAAAACCATTTCTAAGGCAAAAGGCCAGCCTCGC |
| | | | GAGCCTCAGGTGTACGTGCTGCCACCTTCCCGCGACGAGCTGACCAAGA |
| | | | ATCAGGTGTCTCTGCTGTGCCTGGTGAAGGGCTTCTATCCAAGCGATAT |
| | | | CGCAGTGGAGTGGGAGTCCAACGGACAGCCCGAGAACAATTACCTGAC |
| | | | CTGGCCACCCGTGCTGGACAGCGATGGCTCCTTCTTTCTGTATTCCAAG |
| | | | CTGACAGTGGACAAGTCTAGATGGCAGCAGGGCAACGTGTTCAGCTGT |
| | | | TCCGTGATGCACGAGGCCCTGCACAACCACTACACCCAGAAGTCTCTGA |
| | | | GCTTAAGCCCAGGAGGAGGAGGAGGCAGCGGCGGAGGAGGCTCCATG |
| | | | AGCGGGCGGAGCGCCAACGCAGGGGGCGGCGGCAGCGGAGGCGGCGG |
| | | | CAGCCAGTCCGTGCTGACCCAGCCACCTTCTGTGAGCGGAGCCCCCGGA |
| | | | CAGAGGGTGACAATCTCCTGCTCTGGCAGCCGCTCCAACATCGGCTCCA |
| | | | ATACCGTGAAGTGGTATCAGCAGCTGCCAGGCACAGCCCCCAAGCTGC |
| | | | TGATCTACTATAATGACCAGCGGCCTAGCGGCGTGCCAGATAGATTCTC |
| | | | TGGCAGCAAGTCCGGCACCTCTGCCAGCCTGGCCATCACAGGCCTGCAG |
| | | | GCAGAGGACGAGGCAGATTACTATTGCCAGTCCTACGACCGCTATACCC |
| | | | ACCCTGCCCTGCTGTTTGGCACCGGCACAAAGGTGACAGTGCTGGGCGG |
| | | | CGGCGGCAGCGGCGGGGGAGGCTCCGGCGGCGGCGGCTCTCAGGTGCA |
| | | | GCTGGTGGAGAGCGGAGGAGGAGTGGTGCAGCCCGGCAGAAGCCTGCG |
| | | | GCTGAGCTGTGCAGCCAGCGGCTTCACCTTTAGCTCCTACGGCATGCAC |
| | | | TGGGTGCGGCAGGCCCCTGGCAAGGGACTGGAGTGGGTGGCCTTCATC |
| | | | AGATATGACGGCAGCAACAAGTACTATGCCGATTCCGTGAAGGGCAGG |
| | | | TTTACCATCTCCCGCGATAACTCTAAGAATACACTGTATCTGCAGATGA |
| | | | ACTCCCTGCGGGCAGAGGACACCGCCGTGTACTATTGTAAGACACACG |
| | | | GCTCTCACGATAATTGGGGCCAGGGCACCATGGTGACAGTGTCTAGC |
| 126 | 21418 | Full nt | CAGGTGCAGCTGGTGGAGAGCGGCGGCGGCGTGGTGCAGCCTGGCAGG |
| | | | TCTCTGCGCCTGAGCTGCGCAGCCTCCGGCTTCACCTTTAGCTCCTACGG |
| | | | CATGCACTGGGTGCGGCAGGCCCCTGGCAAGGGACTGGAGTGGGTGGC |
| | | | CTTCATCAGATATGACGGCTCCAACAAGTACTATGCCGATTCTGTGAAG |
| | | | GGCAGGTTTACAATCAGCCGGGACAACAGCAAGAATACCCTGTACCTG |
| | | | CAGATGAACTCCCTGAGGGCCGAGGACACAGCCGTGTACTATTGCAAG |
| | | | ACCCACGGCTCTCACGATAATTGGGGCCAGGGCACCATGGTGACAGTG |
| | | | TCTTCCGGAGGAGGAGGCTCCGGAGGAGGAGGCTCTGGCGGCGGCGGC |
| | | | TCTCAGAGCGTGCTGACACAGCCACCTTCCGTGTCTGGAGCCCCCGGAC |
| | | | AGCGGGTGACCATCAGCTGTTCCGGCTCTAGAAGCAACATCGGCAGCA |
| | | | ATACAGTGAAGTGGTATCAGCAGCTGCCAGGAACCGCCCCCAAGCTGC |
| | | | TGATCTACTATAACGACCAGAGGCCTTCCGGCGTGCCAGATCGCTTCTC |
| | | | CGGCTCTAAGAGCGGCACATCCGCCTCTCTGGCCATCACCGGACTGCAG |
| | | | GCAGAGGACGAGGCAGATTACTATTGTCAGAGCTACGACAGGTATACA |
| | | | CACCCTGCCCTGCTGTTTGGCACCGGCACAAAGGTGACCGTGCTGGGCG |
| | | | GAGGAGGCAGCGGCGGCGGAGGCTCCGGAGGCGGCGGCAGCATGAGC |
| | | | GGGCGGAGCGCCAACGCAGGGGGCGGCGGCTCTGGAGGAGGAGGCAG |
| | | | CATCTGGGAGCTGAAGAAGGACGTGTACGTGGTGGAGCTGGACTGGTA |
| | | | CCCTGATGCCCCTGGCGAGATGGTGGTGCTGACCTGCGACACACCAGA |
| | | | GGAGGATGGCATCACCTGGACACTGGACCAGTCCTCTGAGGTGCTGGG |
| | | | CAGCGGCAAGACCCTGACAATCCAGGTGAAGGAGTTCGGCGATGCCGG |
| | | | ACAGTACACCTGTCACAAGGGCGGCGAGGTGCTGTCTCACAGCCTGCTG |
| | | | CTGCTGCACAAGAAGGAGGACGGCATCTGGAGCACAGACATCCTGAAG |
| | | | GATCAGAAGGAGCCAAAGAACAAGACCTTCCTGAGGTGCGAGGCCAAG |
| | | | AATTATAGCGGCAGATTCACCTGTTGGTGGCTGACCACAATCAGCACCG |
| | | | ACCTGACATTTTCCGTGAAGAGCTCCCGGGGCTCTAGCGATCCCCAGGG |
| | | | AGTGACATGCGGAGCCGCCACCCTGAGCGCCGAGCGGGTGAGAGGCGA |
| | | | CAACAAGGAGTACGAGTATAGCGTGGAGTGCCAGGAGGATTCCGCCTG |
| | | | TCCAGCCGCCGAGGAGTCCCTGCCAATCGAAGTGATGGTGGACGCCGT |
| | | | GCACAAGCTGAAGTACGAGAATTATACCTCCTCTTTCTTTATCCGGGAC |
| | | | ATCATCAAGCCTGATCCACCCAAGAACCTGCAGCTGAAGCCCCTGAAG |
| | | | AACAGCAGACAGGTGGAGGTGAGCTGGGAGTACCCCGATACCTGGTCC |
| | | | ACACCTCACAGCTATTTCTCCCTGACCTTTTGCGTGCAGGTGCAGGGCA |
| | | | AGTCTAAGCGGGAGAAGAAGGACAGAGTGTTTACCGATAAGACAAGCG |
| | | | CCACCGTGATCTGTAGAAAGAACGCCAGCATCTCTGTGCGGGCACAGG |
| | | | ACCGGTACTATAGCTCCTCTTGGTCCGAGTGGGCCTCTGTGCCCTGCAG |
| | | | TGGCGGCGGCGGCTCCGGCGGAGGAGGCTCTGAGCCTAAGAGCTCCGA |
| | | | TAAGACCCACACATGCCCTCCATGTCCGGCGCCAGAGGCTGCAGGAGG |
| | | | ACCAAGCGTGTTCCTGTTTCCACCCAAGCCTAAAGACACACTGATGATT |
| | | | TCCCGAACCCCCGAAGTCACATGCGTGGTCGTGTCTGTGAGTCACGAGG |
| | | | ACCCTGAAGTCAAGTTCAACTGGTACGTGGATGGCGTCGAGGTGCATA |
| | | | ATGCCAAGACTAAACCTAGGGAGGAACAGTACAACTCAACCTATCGCG |
| | | | TCGTGAGCGTCCTGACAGTGCTGCACCAGGATTGGCTGAACGGCAAAG |
| | | | AATATAAGTGCAAAGTGAGCAATAAGGCCCTGCCCGCTCCTATCGAGA |
| | | | AAACCATTTCCAAGGCTAAAGGGCAGCCTCGCGAACCACAGGTCTACG |
| | | | TGTATCCTCCAAGCCGGGACGAGCTGACAAAGAACCAGGTCTCCCTGA |
| | | | CTTGTCTGGTGAAAGGGTTTTACCCTAGTGATATCGCTGTGGAGTGGGA |
| | | | ATCAAATGGACAGCCAGAGAACAATTATAAGACTACCCCCCCTGTGCT |
| | | | GGACAGTGATGGGTCATTCGCACTGGTCTCCAAGCTGACAGTGGACAA |
| | | | ATCTCGGTGGCAGCAGGGAAATGTCTTTTCATGTAGCGTGATGCATGAA |
| | | | GCACTGCACAACCATTACACCCAGAAGTCACTGTCACTGTCACCAGGA |
| 127 | 21419 | Full nt | AGAAACCTGCCCGTGGCCACCCCAGATCCCGGAATGTTTCCATGCCTGC |
| | | | ACCACTCTCAGAACCTGCTGCGGGCCGTGAGCAATATGCTGCAGAAGG |
| | | | CCAGACAGACCCTGGAGTTCTACCCCTGTACATCCGAGGAGATCGACCA |
| | | | CGAGGATATCACCAAGGACAAGACCTCTACAGTGGAGGCCTGCCTGCC |
| | | | TCTGGAGCTGACAAAGAACGAGTCTTGTCTGAATAGCAGGGAGACCTC |
| | | | CTTCATCACAAATGGCTCTTGCCTGGCCAGCCGCAAGACCTCCTTTATG |
| | | | ATGGCCCTGTGCCTGAGCTCCATCTACGAGGATCTGAAGATGTATCAGG |
| | | | TGGAGTTCAAGACAATGAACGCCAAGCTGCTGATGGACCCCAAGCGGC |
| | | | AGATCTTTCTGGATCAGAATATGCTGGCCGTGATCGACGAGCTGATGCA |
| | | | GGCCCTGAACTTTAATAGCGAGACCGTGCCTCAGAAGTCTAGCCTGGAG |
| | | | GAGCCAGATTTCTACAAGACAAAGATCAAGCTGTGCATCCTGCTGCACG |
| | | | CCTTCCGGATCAGAGCCGTGACCATCGACAGAGTGATGTCCTATCTGAA |
| | | | CGCCTCTGGAGGAGGAGGCAGCGGAGGAGGCGGCTCTATGAGCGGGCG |
| | | | GAGCGCCAACGCAGGGGGAGGAGGCTCCGGCGGAGGAGGCTCTGGCG |
| | | | GCGGCGGCTCCCAGTCTGTGCTGACCCAGCCACCTAGCGTGTCCGGAGC |
| | | | CCCCGGCCAGAGGGTGACAATCTCTTGTAGCGGCTCCCGCTCTAACATC |
| | | | GGCAGCAATACCGTGAAGTGGTATCAGCAGCTGCCTGGCACAGCCCCA |
| | | | AAGCTGCTGATCTACTATAACGATCAGAGACCCTCCGGCGTGCCTGACA |
| | | | GATTCAGCGGCTCCAAGTCTGGCACCAGCGCCTCCCTGGCCATCACAGG |
| | | | CCTGCAGGCAGAGGACGAGGCAGATTACTATTGCCAGAGCTACGATCG |
| | | | GTATACCCACCCTGCCCTGCTGTTCGGCACCGGCACAAAGGTGACAGTG |
| | | | CTGGGCGGCGGCGGCAGCGGAGGAGGAGGCTCCGGAGGCGGCGGCTCT |
| | | | CAGGTGCAGCTGGTGGAGTCCGGAGGAGGAGTGGTGCAGCCAGGCCGG |
| | | | TCTCTGAGACTGAGCTGTGCCGCCTCCGGCTTCACCTTTTCCTCTTACGG |
| | | | CATGCACTGGGTGCGGCAGGCCCCCGGCAAGGGACTGGAGTGGGTGGC |
| | | | CTTCATCAGATATGATGGCAGCAATAAGTACTATGCCGACTCCGTGAAG |
| | | | GGCAGGTTTACCATCAGCCGGGACAACAGCAAGAATACACTGTATCTG |
| | | | CAGATGAACAGCCTGAGAGCCGAGGATACCGCCGTGTACTATTGCAAG |
| | | | ACACACGGCTCCCACGACAATTGGGGCCAGGGCACCATGGTGACAGTG |
| | | | AGCTCC |
| 128 | 21421 | Full nt | GAGCCAAAGAGCTCCGACAAGACCCACACATGCCCACCTTGTCCGGCG |
| | | | CCAGAGGCCGCCGGAGGACCTAGCGTGTTCCTGTTTCCACCCAAGCCAA |
| | | | AGGATACCCTGATGATCAGCAGGACCCCAGAGGTGACATGCGTGGTGG |
| | | | TGTCTGTGAGCCACGAGGACCCCGAGGTGAAGTTTAACTGGTACGTGG |
| | | | ATGGCGTGGAGGTGCACAATGCCAAGACAAAGCCACGGGAGGAGCAGT |
| | | | ACAACTCCACCTATAGAGTGGTGTCTGTGCTGACAGTGCTGCACCAGGA |
| | | | CTGGCTGAACGGCAAGGAGTATAAGTGCAAGGTGAGCAATAAGGCCCT |
| | | | GCCTGCCCCAATCGAGAAGACCATCTCCAAGGCCAAGGGCCAGCCTCG |
| | | | CGAACCTCAGGTGTACGTGTATCCTCCATCCCGCGACGAGCTGACCAAG |
| | | | AACCAGGTGTCTCTGACATGTCTGGTGAAGGGCTTCTACCCCTCTGATA |
| | | | TCGCCGTGGAGTGGGAGAGCAATGGCCAGCCTGAGAACAATTATAAGA |
| | | | CCACACCCCCTGTGCTGGACAGCGATGGCTCCTTCGCCCTGGTGAGCAA |
| | | | GCTGACCGTGGATAAGTCCAGATGGCAGCAGGGCAACGTGTTTTCCTGT |
| | | | TCTGTGATGCACGAGGCCCTGCACAATCACTACACACAGAAGAGCCTG |
| | | | AGCTTAAGCCCAGGAGGAGGAGGAGGCTCTGGAGGAGGAGGCAGCAT |
| | | | CTGGGAGCTGAAGAAGGACGTGTATGTGGTGGAGCTGGATTGGTACCC |
| | | | TGATGCCCCAGGCGAGATGGTGGTGCTGACCTGCGACACACCCGAGGA |
| | | | GGATGGCATCACCTGGACACTGGACCAGAGCTCCGAGGTGCTGGGCAG |
| | | | CGGCAAGACCCTGACAATCCAGGTGAAGGAGTTCGGCGATGCCGGACA |
| | | | GTACACCTGTCACAAGGGAGGAGAGGTGCTGAGCCACTCCCTGCTGCT |
| | | | GCTGCACAAGAAGGAGGATGGCATCTGGTCCACAGACATCCTGAAGGA |
| | | | TCAGAAGGAGCCAAAGAACAAGACCTTCCTGCGGTGCGAGGCCAAGAA |
| | | | TTATAGCGGCAGATTCACCTGTTGGTGGCTGACCACAATCTCCACCGAC |
| | | | CTGACATTTTCTGTGAAGTCTAGCAGGGGCTCCTCTGATCCCCAGGGAG |
| | | | TGACATGCGGAGCCGCCACCCTGTCCGCCGAGCGGGTGAGAGGCGACA |
| | | | ACAAGGAGTACGAGTATTCTGTGGAGTGCCAGGAGGATAGCGCCTGTC |
| | | | CCGCCGCCGAGGAGAGCCTGCCTATCGAAGTGATGGTGGACGCCGTGC |
| | | | ACAAGCTGAAGTACGAGAATTATACAAGCTCCTTCTTTATCCGGGACAT |
| | | | CATCAAGCCAGATCCCCCTAAGAACCTGCAGCTGAAGCCCCTGAAGAA |
| | | | TAGCAGACAGGTGGAGGTGTCCTGGGAGTACCCTGATACCTGGAGCAC |
| | | | ACCACACTCCTATTTCTCTCTGACCTTTTGCGTGCAGGTGCAGGGCAAG |
| | | | TCTAAGAGGGAGAAGAAGGACCGCGTGTTTACCGATAAGACAAGCGCC |
| | | | ACCGTGATCTGTAGGAAGAACGCCTCTATCAGCGTGCGGGCACAGGAC |
| | | | CGGTACTATTCTAGCTCCTGGAGCGAGTGGGCCTCCGTGCCTTGCTCTG |
| | | | GAGGAGGAGGCAGCGGCGGAGGAGGCTCCATGAGCGGGCGGAGCGCC |
| | | | AACGCAGGGGGCGGCGGCTCTGGCGGCGGCGGCAGCGGAGGCGGCGG |
| | | | CAGCCAGTCCGTGCTGACACAGCCACCATCTGTGAGCGGAGCCCCCGG |
| | | | ACAGAGGGTGACCATCTCCTGTTCTGGCAGCCGCTCCAACATCGGCTCC |
| | | | AATACAGTGAAGTGGTATCAGCAGCTGCCAGGAACCGCCCCTAAGCTG |
| | | | CTGATCTACTATAACGACCAGAGGCCAAGCGGAGTGCCAGATCGCTTCT |
| | | | CTGGCAGCAAGTCCGGCACATCTGCCAGCCTGGCCATCACCGGACTGCA |
| | | | GGCAGAGGACGAGGCCGATTACTATTGCCAGTCCTACGATCGGTATAC |
| | | | ACACCCTGCCCTGCTGTTTGGCACCGGCACAAAGGTGACCGTGCTGGGC |
| | | | GGAGGAGGCTCCGGAGGAGGAGGCTCTGGAGGAGGCGGCAGCCAGGT |
| | | | GCAGCTGGTGGAGAGCGGCGGCGGCGTGGTGCAGCCCGGCAGGAGCCT |
| | | | GCGCCTGTCCTGTGCAGCCTCTGGCTTCACCTTTTCTAGCTACGGCATGC |
| | | | ACTGGGTGCGGCAGGCCCCTGGCAAGGGACTGGAGTGGGTGGCCTTCA |
| | | | TCAGATATGACGGCTCCAATAAGTACTATGCCGATTCTGTGAAGGGCCG |
| | | | GTTTACAATCAGCAGAGATAACTCCAAGAATACCCTGTACCTGCAGATG |
| | | | AACTCCCTGAGAGCCGAGGACACAGCCGTGTACTATTGTAAGACCCAC |
| | | | GGCTCTCACGATAATTGGGGCCAGGGCACAATGGTGACCGTGTCCTCT |
| 129 | 21423 | Full nt | GAGCCAAAGAGCTCCGACAAGACCCACACATGCCCCCCTTGTCCGGCG |
| | | | CCAGAGGCTGCAGGAGGACCAAGCGTGTTCCTGTTTCCACCCAAGCCTA |
| | | | AAGACACACTGATGATTTCCCGAACCCCCGAAGTCACATGCGTGGTCGT |
| | | | GTCTGTGAGTCACGAGGACCCTGAAGTCAAGTTCAACTGGTACGTGGAT |
| | | | GGCGTCGAGGTGCATAATGCCAAGACTAAACCTAGGGAGGAACAGTAC |
| | | | AACTCAACCTATCGCGTCGTGAGCGTCCTGACAGTGCTGCACCAGGATT |
| | | | GGCTGAACGGCAAAGAATATAAGTGCAAAGTGAGCAATAAGGCCCTGC |
| | | | CCGCTCCTATCGAGAAAACCATTTCCAAGGCTAAAGGGCAGCCTCGCG |
| | | | AACCTCAGGTGTACGTGTATCCACCCTCCCGCGATGAGCTGACAAAGAA |
| | | | CCAGGTGTCTCTGACCTGTCTGGTGAAGGGCTTTTACCCTAGCGACATC |
| | | | GCCGTGGAGTGGGAGTCCAATGGCCAGCCAGAGAACAATTATAAGACC |
| | | | ACACCTCCAGTGCTGGACTCTGATGGCAGCTTCGCCCTGGTGTCTAAGC |
| | | | TGACAGTGGACAAGAGCAGATGGCAGCAGGGCAACGTGTTTTCTTGTA |
| | | | GCGTGATGCACGAGGCCCTGCACAATCACTACACCCAGAAGTCCCTGA |
| | | | GCTTAAGCCCAGGAGGCTCCGCCGATGGAGGAATCTGGGAGCTGAAGA |
| | | | AGGACGTGTACGTGGTGGAGCTGGACTGGTACCCTGATGCCCCTGGCG |
| | | | AGATGGTGGTGCTGACCTGCGACACACCCGAGGAGGATGGCATCACCT |
| | | | GGACACTGGATCAGAGCTCCGAGGTGCTGGGCAGCGGCAAGACCCTGA |
| | | | CAATCCAGGTGAAGGAGTTCGGCGACGCCGGACAGTACACCTGTCACA |
| | | | AGGGCGGCGAGGTGCTGTCCCACTCTCTGCTGCTGCTGCACAAGAAGG |
| | | | AGGACGGCATCTGGTCTACAGACATCCTGAAGGATCAGAAGGAGCCTA |
| | | | AGAACAAGACCTTCCTGAGGTGCGAGGCCAAGAATTATAGCGGCAGAT |
| | | | TCACCTGTTGGTGGCTGACCACAATCTCCACCGATCTGACATTTTCTGTG |
| | | | AAGTCTAGCCGGGGCTCCTCTGACCCACAGGGAGTGACATGCGGAGCC |
| | | | GCCACCCTGTCCGCCGAGCGGGTGAGAGGCGATAACAAGGAGTACGAG |
| | | | TATTCTGTGGAGTGCCAGGAGGACAGCGCCTGTCCAGCCGCCGAGGAG |
| | | | AGCCTGCCAATCGAAGTGATGGTGGATGCCGTGCACAAGCTGAAGTAC |
| | | | GAGAATTATACAAGCTCCTTCTTTATCCGGGACATCATCAAGCCCGATC |
| | | | CCCCTAAGAACCTGCAGCTGAAGCCTCTGAAGAATAGCAGACAGGTGG |
| | | | AGGTGTCCTGGGAGTACCCCGACACCTGGAGCACACCTCACTCTTATTT |
| | | | CAGCCTGACCTTTTGCGTGCAGGTGCAGGGCAAGTCTAAGCGGGAGAA |
| | | | GAAGGACAGAGTGTTCACCGATAAGACAAGCGCCACCGTGATCTGTCG |
| | | | GAAGAACGCCAGCATCTCCGTGAGGGCACAGGACCGGTACTATTCTAG |
| | | | CTCCTGGTCCGAGTGGGCCTCTGTGCCCTGTAGCGGAGGAGGAGGCAG |
| | | | CGGAGGAGGAGGCTCCGGAGGCGGCGGCTCTAGAAATCTGCCAGTGGC |
| | | | CACCCCTGACCCAGGCATGTTCCCCTGCCTGCACCACAGCCAGAACCTG |
| | | | CTGAGGGCCGTGTCCAATATGCTGCAGAAGGCCCGCCAGACACTGGAG |
| | | | TTTTACCCTTGTACCTCCGAGGAGATCGACCACGAGGATATCACAAAGG |
| | | | ATAAGACCTCTACAGTGGAGGCCTGCCTGCCACTGGAGCTGACCAAGA |
| | | | ACGAGTCCTGTCTGAACAGCCGGGAGACCAGCTTCATCACCAACGGCTC |
| | | | CTGCCTGGCCTCTAGAAAGACAAGCTTTATGATGGCCCTGTGCCTGAGC |
| | | | AGCATCTACGAGGACCTGAAGATGTATCAGGTGGAGTTCAAGACCATG |
| | | | AACGCCAAGCTGCTGATGGACCCCAAGCGGCAGATCTTTCTGGATCAG |
| | | | AATATGCTGGCCGTGATCGACGAGCTGATGCAGGCCCTGAACTTCAATT |
| | | | CCGAGACAGTGCCTCAGAAGTCCTCTCTGGAGGAGCCAGATTTCTACAA |
| | | | GACCAAGATCAAGCTGTGCATCCTGCTGCACGCCTTCCGGATCAGAGCC |
| | | | GTGACCATCGACAGAGTGATGAGCTATCTGAACGCCTCCGGAGGAGGA |
| | | | GGCTCTGGAGGAGGCGGCAGCGGCGGCGGCGGCTCTATGAGCGGGCGG |
| | | | AGCGCCAACGCAGGGGGAGGAGGCTCCGGCGGGGGAGGCTCTGGCGG |
| | | | CGGAGGCAGCGGAGGAGGCGGCTCCCAGTCTGTGCTGACACAGCCACC |
| | | | AAGCGTGTCCGGAGCCCCCGGACAGAGGGTGACCATCTCTTGTAGCGG |
| | | | CTCCAGATCTAACATCGGCTCCAATACAGTGAAGTGGTATCAGCAGCTG |
| | | | CCAGGAACCGCCCCCAAGCTGCTGATCTACTATAACGATCAGCGGCCTA |
| | | | GCGGCGTGCCAGACAGATTCAGCGGCTCCAAGTCTGGCACAAGCGCCT |
| | | | CCCTGGCCATCACCGGACTGCAGGCCGAGGACGAGGCCGATTACTATT |
| | | | GCCAGTCCTACGATAGGTATACACACCCTGCCCTGCTGTTTGGCACCGG |
| | | | CACAAAGGTGACCGTGCTGGGCGGAGGAGGCTCCGGCGGAGGCGGCTC |
| | | | TGGCGGCGGCGGCAGCCAGGTGCAGCTGGTGGAGAGCGGCGGCGGCGT |
| | | | GGTGCAGCCCGGCAGAAGCCTGCGGCTGAGCTGTGCAGCCAGCGGCTT |
| | | | CACCTTTAGCTCCTACGGCATGCACTGGGTGAGGCAGGCCCCTGGCAAG |
| | | | GGACTGGAGTGGGTGGCCTTCATCCGCTATGATGGCTCCAATAAGTACT |
| | | | ATGCCGACTCTGTGAAGGGCAGGTTTACAATCTCCCGCGACAACTCTAA |
| | | | GAATACCCTGTACCTGCAGATGAACAGCCTGCGCGCCGAGGATACAGC |
| | | | CGTGTACTATTGCAAGACCCACGGCTCCCACGACAATTGGGGCCAGGG |
| | | | CACAATGGTGACCGTGTCTAGC |
| 130 | 21446 | Full nt | CAGGTGCAGCTGGTGGAGAGCGGCGGCGGCGTGGTGCAGCCCGGCAGG |
| | | | AGCCTGCGCCTGTCCTGCGCAGCCTCTGGCTTCACCTTTAGCTCCTACGG |
| | | | CATGCACTGGGTGCGGCAGGCCCCAGGCAAGGGACTGGAGTGGGTGGC |
| | | | CTTCATCAGATATGACGGCTCCAACAAGTACTATGCCGATTCTGTGAAG |
| | | | GGCAGGTTTACAATCAGCCGCGACAACTCCAAGAATACCCTGTACCTGC |
| | | | AGATGAACAGCCTGAGGGCCGAGGACACAGCCGTGTACTATTGCAAGA |
| | | | CCCACGGCTCCCACGATAATTGGGGCCAGGGCACCATGGTGACAGTGT |
| | | | CTAGTGGAGGAGGAGGCTCTGGAGGAGGAGGCAGCGGAGGAGGAGGC |
| | | | AGCCAGTCCGTGCTGACACAGCCCCCTTCTGTGAGCGGAGCCCCCGGAC |
| | | | AGAGGGTGACCATCTCCTGTTCTGGCAGCAGATCCAACATCGGCAGCA |
| | | | ATACAGTGAAGTGGTATCAGCAGCTGCCAGGAACCGCCCCTAAGCTGC |
| | | | TGATCTACTATAACGACCAGAGGCCATCCGGAGTGCCAGATCGCTTCTC |
| | | | TGGCAGCAAGTCCGGCACATCTGCCAGCCTGGCCATCACCGGACTGCA |
| | | | GGCAGAGGACGAGGCCGATTACTATTGTCAGAGCTACGACAGGTATAC |
| | | | ACACCCCGCCCTGCTGTTTGGCACCGGCACAAAGGTGACCGTGCTGGGC |
| | | | GGCGGCGGCTCTGGCGGCGGCGGCTCCATGAGCGGGCGGAGCGCCAAC |
| | | | GCAGGGGGAGGAGGCTCCGGAGGAGGAGGCTCTATCTGGGAGCTGAAG |
| | | | AAGGACGTGTACGTGGTGGAGCTGGACTGGTACCCTGATGCCCCAGGC |
| | | | GAGATGGTGGTGCTGACCTGCGACACACCTGAGGAGGATGGCATCACC |
| | | | TGGACACTGGACCAGTCCTCTGAGGTGCTGGGCTCCGGCAAGACCCTGA |
| | | | CAATCCAGGTGAAGGAGTTCGGCGATGCCGGACAGTACACCTGTCACA |
| | | | AGGGAGGAGAGGTGCTGAGCCACTCCCTGCTGCTGCTGCACAAGAAGG |
| | | | AGGACGGCATCTGGTCTACAGACATCCTGAAGGATCAGAAGGAGCCTA |
| | | | AGAACAAGACCTTCCTGAGGTGCGAGGCCAAGAATTATAGCGGCAGAT |
| | | | TCACCTGTTGGTGGCTGACCACAATCAGCACCGACCTGACATTTTCCGT |
| | | | GAAGAGCTCCCGGGGCTCTAGCGATCCACAGGGAGTGACATGCGGAGC |
| | | | CGCCACCCTGAGCGCCGAGCGGGTGAGAGGCGACAACAAGGAGTACGA |
| | | | GTATAGCGTGGAGTGCCAGGAGGATTCCGCCTGTCCCGCCGCCGAGGA |
| | | | GTCCCTGCCTATCGAAGTGATGGTGGACGCCGTGCACAAGCTGAAGTAC |
| | | | GAGAATTATACCTCCTCTTTCTTTATCCGGGACATCATCAAGCCAGATC |
| | | | CACCCAAGAACCTGCAGCTGAAGCCCCTGAAGAACAGCAGACAGGTGG |
| | | | AGGTGAGCTGGGAGTACCCTGATACCTGGAGCACACCACACTCCTATTT |
| | | | CTCTCTGACCTTTTGCGTGCAGGTGCAGGGCAAGTCCAAGCGGGAGAA |
| | | | GAAGGACAGAGTGTTTACCGATAAGACATCTGCCACCGTGATCTGTAG |
| | | | AAAGAACGCCAGCATCAGCGTGCGGGCACAGGACCGGTACTATAGCTC |
| | | | CTCTTGGTCTGAGTGGGCCAGCGTGCCTTGTTCC |
| 131 | 21447 | Full nt | CAGGTGCAGCTGGTGGAGAGCGGAGGAGGAGTGGTGCAGCCAGGCAG |
| | | | GTCTCTGCGCCTGAGCTGCGCAGCCTCCGGCTTCACCTTTAGCTCCTACG |
| | | | GCATGCACTGGGTGCGGCAGGCCCCTGGCAAGGGACTGGAGTGGGTGG |
| | | | CCTTCATCAGATATGACGGCTCTAACAAGTACTATGCCGATAGCGTGAA |
| | | | GGGCCGGTTTACCATCTCTAGAGATAACAGCAAGAATACACTGTACCTG |
| | | | CAGATGAACTCTCTGAGGGCCGAGGATACCGCCGTGTACTATTGCAAG |
| | | | ACACACGGCTCCCACGACAATTGGGGCCAGGGCACCATGGTGACAGTG |
| | | | TCTAGCGGAGGAGGAGGCTCCGGAGGAGGAGGCTCTGGCGGCGGCGGC |
| | | | TCTCAGAGCGTGCTGACCCAGCCACCTTCCGTGTCTGGAGCCCCCGGAC |
| | | | AGAGGGTGACAATCAGCTGTTCCGGCTCTAGAAGCAACATCGGCAGCA |
| | | | ATACCGTGAAGTGGTATCAGCAGCTGCCTGGCACAGCCCCAAAGCTGCT |
| | | | GATCTACTATAATGACCAGAGGCCCTCCGGCGTGCCTGATCGCTTCTCC |
| | | | GGCTCTAAGAGCGGCACCTCCGCCTCTCTGGCCATCACAGGCCTGCAGG |
| | | | CAGAGGACGAGGCAGATTACTATTGTCAGAGCTACGACAGATACACCC |
| | | | ACCCCGCCCTGCTGTTTGGCACCGGCACAAAGGTGACAGTGCTGGGCG |
| | | | GAGGAGGCAGCGGCGGCGGAGGCTCCGGAGGCGGCGGCTCTGGAGGA |
| | | | GGCGGCAGCATGAGCGGGCGGAGCGCCAACGCAGGGGGCGGCGGCAG |
| | | | CGGCGGCGGCGGCTCCGGAGGAGGGGGCTCTCGCAATCTGCCTGTGGC |
| | | | CACCCCAGATCCCGGCATGTTCCCATGCCTGCACCACTCCCAGAACCTG |
| | | | CTGAGGGCCGTGTCTAATATGCTGCAGAAGGCCCGCCAGACCCTGGAG |
| | | | TTTTACCCCTGTACAAGCGAGGAGATCGACCACGAGGATATCACCAAG |
| | | | GACAAGACCTCCACAGTGGAGGCCTGCCTGCCTCTGGAGCTGACAAAG |
| | | | AACGAGTCCTGTCTGAACAGCCGGGAGACCAGCTTCATCACAAACGGC |
| | | | TCCTGCCTGGCCTCTCGCAAGACCAGCTTTATGATGGCCCTGTGCCTGA |
| | | | GCTCTATCTACGAGGATCTGAAGATGTATCAGGTGGAGTTCAAGACAAT |
| | | | GAACGCCAAGCTGCTGATGGACCCCAAGCGGCAGATCTTTCTGGATCA |
| | | | GAATATGCTGGCCGTGATCGACGAGCTGATGCAGGCCCTGAACTTTAAT |
| | | | AGCGAGACCGTGCCACAGAAGAGCTCCCTGGAGGAGCCCGATTTCTAC |
| | | | AAGACAAAGATCAAGCTGTGCATCCTGCTGCACGCCTTTCGGATCAGAG |
| | | | CCGTGACCATCGACAGAGTGATGAGCTACCTGAACGCCAGC |
| 132 | 21451 | Full nt | CAGGTGCAGCTGGTGGAGAGCGGCGGCGGCGTGGTGCAGCCTGGCCGG |
| | | | AGCCTGAGACTGTCCTGCGCAGCCTCTGGCTTCACCTTTAGCTCCTACG |
| | | | GCATGCACTGGGTGCGGCAGGCCCCTGGCAAGGGACTGGAGTGGGTGG |
| | | | CCTTCATCAGATATGACGGCTCCAACAAGTACTATGCCGATTCTGTGAA |
| | | | GGGCAGGTTTACCATCAGCCGCGACAACTCCAAGAATACACTGTACCTG |
| | | | CAGATGAACAGCCTGCGGGCAGAGGACACCGCCGTGTACTATTGCAAG |
| | | | ACACACGGCTCCCACGATAATTGGGGCCAGGGCACCATGGTGACAGTG |
| | | | TCTTCCGGAGGAGGAGGCTCTGGAGGAGGAGGCAGCGGAGGAGGAGG |
| | | | CAGCCAGTCCGTGCTGACCCAGCCACCTTCTGTGAGCGGAGCCCCCGGA |
| | | | CAGAGGGTGACAATCTCCTGTTCTGGCAGCCGCTCCAACATCGGCTCTA |
| | | | ATACCGTGAAGTGGTATCAGCAGCTGCCTGGCACAGCCCCAAAGCTGCT |
| | | | GATCTACTATAACGACCAGAGACCCTCCGGCGTGCCTGATAGATTCTCT |
| | | | GGCAGCAAGTCCGGCACCTCTGCCAGCCTGGCCATCACAGGCCTGCAG |
| | | | GCAGAGGACGAGGCAGATTACTATTGTCAGAGCTACGACAGATACACC |
| | | | CACCCAGCCCTGCTGTTTGGCACCGGCACAAAGGTGACAGTGCTGGGC |
| | | | GGAGGAGGCTCCGGCGGCGGAGGCTCTGGCGGCGGCGGCAGCGGAGG |
| | | | CGGCGGCTCCATGAGCGGGCGGAGCGCCAACGCAGGGGGCGGCGGCTC |
| | | | CGGCGGCGGCGGCTCTGGAGGAGGCGGCAGCGAGCCCAAGTCCTCTGA |
| | | | TAAGACCCACACATGCCCACCCTGTCCGGCGCCAGAGGCAGCAGGAGG |
| | | | ACCAAGCGTGTTCCTGTTTCCACCCAAGCCCAAAGACACCCTGATGATT |
| | | | AGCCGAACCCCTGAAGTCACATGCGTGGTCGTGTCCGTGTCTCACGAGG |
| | | | ACCCAGAAGTCAAGTTCAACTGGTACGTGGATGGCGTCGAGGTGCATA |
| | | | ATGCCAAGACAAAACCCCGGGAGGAACAGTACAACAGCACCTATAGAG |
| | | | TCGTGTCCGTCCTGACAGTGCTGCACCAGGATTGGCTGAACGGCAAGGA |
| | | | ATATAAGTGCAAAGTGTCCAATAAGGCCCTGCCCGCTCCTATCGAGAAA |
| | | | ACCATTTCTAAGGCAAAAGGCCAGCCTCGCGAACCACAGGTCTACGTG |
| | | | CTGCCTCCATCCCGGGACGAGCTGACAAAGAACCAGGTCTCTCTGCTGT |
| | | | GCCTGGTGAAAGGCTTCTATCCATCAGATATTGCTGTGGAGTGGGAAAG |
| | | | CAATGGGCAGCCCGAGAACAATTACCTGACTTGGCCCCCTGTGCTGGAC |
| | | | TCTGATGGGAGTTTCTTTCTGTATTCTAAGCTGACCGTGGATAAAAGTA |
| | | | GGTGGCAGCAGGGAAATGTCTTTAGTTGTTCAGTGATGCATGAAGCCCT |
| | | | GCATAACCACTACACCCAGAAAAGCCTGTCCCTGTCCCCCGGA |
| 133 | 21452 | Full nt | CAGGTGCAGCTGGTGGAGAGCGGAGGAGGAGTGGTGCAGCCTGGCAGG |
| | | | TCCCTGCGCCTGTCTTGCGCAGCCAGCGGCTTCACCTTTAGCTCCTACGG |
| | | | CATGCACTGGGTGCGGCAGGCCCCCGGCAAGGGACTGGAGTGGGTGGC |
| | | | CTTCATCAGATATGACGGCAGCAACAAGTACTATGCCGATTCCGTGAAG |
| | | | GGCCGGTTTACCATCTCCAGAGATAACTCTAAGAATACACTGTACCTGC |
| | | | AGATGAACAGCCTGAGGGCCGAGGATACCGCCGTGTACTATTGCAAGA |
| | | | CACACGGCTCCCACGACAATTGGGGCCAGGGCACCATGGTGACAGTGT |
| | | | CTTCCGGAGGAGGAGGCAGCGGAGGAGGAGGCTCCGGAGGCGGCGGC |
| | | | TCCCAGTCTGTGCTGACCCAGCCACCTAGCGTGTCCGGAGCCCCCGGCC |
| | | | AGCGGGTGACAATCTCTTGTAGCGGCTCCAGATCTAACATCGGCAGCAA |
| | | | TACCGTGAAGTGGTATCAGCAGCTGCCCGGCACAGCCCCTAAGCTGCTG |
| | | | ATCTACTATAATGACCAGAGGCCATCCGGCGTGCCCGATCGCTTCAGCG |
| | | | GCTCCAAGTCTGGCACCAGCGCCTCCCTGGCCATCACAGGCCTGCAGGC |
| | | | AGAGGACGAGGCAGATTACTATTGTCAGAGCTACGACAGATACACCCA |
| | | | CCCTGCCCTGCTGTTTGGCACCGGCACAAAGGTGACAGTGCTGGGCGGA |
| | | | GGAGGCTCTGGAGGAGGAGGCAGCGGCGGCGGCGGCTCTATGAGCGGG |
| | | | CGGAGCGCCAACGCAGGGGGAGGAGGCTCCGGAGGAGGAGGCTCTGG |
| | | | CGGCGGCGGCAGCGGAGGAGGGGGCTCCCGCAATCTGCCCGTGGCCAC |
| | | | CCCTGATCCAGGCATGTTCCCTTGCCTGCACCACTCTCAGAACCTGCTG |
| | | | AGGGCCGTGAGCAATATGCTGCAGAAGGCCCGCCAGACCCTGGAGTTT |
| | | | TACCCATGTACATCCGAGGAGATCGACCACGAGGATATCACCAAGGAC |
| | | | AAGACCTCTACAGTGGAGGCCTGCCTGCCCCTGGAGCTGACAAAGAAC |
| | | | GAGAGCTGTCTGAACAGCCGGGAGACCAGCTTCATCACAAACGGCAGC |
| | | | TGCCTGGCCTCCCGCAAGACCTCTTTTATGATGGCCCTGTGCCTGAGCTC |
| | | | TATCTACGAGGATCTGAAGATGTATCAGGTGGAGTTCAAGACAATGAA |
| | | | CGCCAAGCTGCTGATGGACCCTAAGCGGCAGATCTTTCTGGATCAGAAT |
| | | | ATGCTGGCCGTGATCGACGAGCTGATGCAGGCCCTGAACTTTAATAGCG |
| | | | AGACCGTGCCTCAGAAGAGCTCCCTGGAGGAGCCAGATTTCTACAAGA |
| | | | CAAAGATCAAGCTGTGCATCCTGCTGCACGCCTTTCGGATCAGAGCCGT |
| | | | GACCATCGACAGAGTGATGTCTTACCTGAACGCCAGCGGCGGCGGAGG |
| | | | CTCCGGAGGAGGCGGCTCTGAGCCAAAGTCTAGCGACAAGACCCACAC |
| | | | ATGCCCACCCTGTCCGGCGCCAGAGGCTGCAGGAGGACCAAGCGTGTT |
| | | | CCTGTTTCCACCCAAGCCTAAAGACACACTGATGATTTCCCGAACCCCC |
| | | | GAAGTCACATGCGTGGTCGTGTCTGTGAGTCACGAGGACCCTGAAGTCA |
| | | | AGTTCAACTGGTACGTGGATGGCGTCGAGGTGCATAATGCCAAGACTA |
| | | | AACCTAGGGAGGAACAGTACAACTCAACCTATCGCGTCGTGAGCGTCC |
| | | | TGACAGTGCTGCACCAGGATTGGCTGAACGGCAAAGAATATAAGTGCA |
| | | | AAGTGAGCAATAAGGCCCTGCCCGCTCCTATCGAGAAAACCATTTCCAA |
| | | | GGCTAAAGGGCAGCCTCGCGAACCACAGGTCTACGTGTATCCTCCAAG |
| | | | CCGGGACGAGCTGACAAAGAACCAGGTCTCCCTGACTTGTCTGGTGAA |
| | | | AGGGTTTTACCCTAGTGATATCGCTGTGGAGTGGGAATCAAATGGACAG |
| | | | CCAGAGAACAATTATAAGACTACCCCCCCTGTGCTGGACAGTGATGGGT |
| | | | CATTCGCACTGGTCTCCAAGCTGACAGTGGACAAATCTCGGTGGCAGCA |
| | | | GGGAAATGTCTTTTCATGTAGCGTGATGCATGAAGCACTGCACAACCAT |
| | | | TACACCCAGAAGTCACTGTCACTGTCACCAGGA |
| 134 | 22203 | Full nt | CAGGTGCAGCTGGTGGAGAGCGGCGGCGGCGTGGTGCAGCCTGGCCGG |
| | | | TCCCTGAGACTGTCTTGCGCAGCCAGCGGCTTCACCTTTAGCTCCGCTG |
| | | | GCATGCACTGGGTGCGGCAGGCCCCTGGCAAGGGACTGGAGTGGGTGG |
| | | | CCTTCATCAGATATGACGGCTCTAACAAGTACTATGCCGATAGCGTGAA |
| | | | GGGCAGGTTTACCATCTCCCGCGACAACTCTAAGAATACACTGTACCTG |
| | | | CAGATGAACTCCCTGCGGGCAGAGGACACCGCCGTGTACTATTGCAAG |
| | | | ACACACGGCTCTCACGATAATTGGGGCCAGGGCACCATGGTGACAGTG |
| | | | TCTAGCGGAGGAGGAGGCAGCGGAGGAGGAGGCTCCGGCGGCGGCGG |
| | | | CAGCCAGTCCGTGCTGACCCAGCCACCTTCTGTGAGCGGAGCCCCCGGA |
| | | | CAGAGGGTGACAATCTCCTGTTCTGGCAGCCGCTCCAACATCGGCAGCA |
| | | | ATACCGTGAAGTGGTATCAGCAGCTGCCTGGCACAGCCCCAAAGCTGCT |
| | | | GATCTACTATAATGACCAGAGACCCTCCGGCGTGCCTGATAGATTCTCT |
| | | | GGCAGCAAGTCCGGCACCTCTGCCAGCCTGGCCATCACAGGACTGCAG |
| | | | GCAGAGGACGAGGCAGATTACTATTGTCAGTCCTACGACAGATATACC |
| | | | CACCCAGCCCTGCTGTTTGGCACCGGCACAAAGGTGACAGTGCTGGCCG |
| | | | CCGAGCCCAAGTCCTCTGATAAGACCCACACATGCCCACCCTGTCCGGC |
| | | | GCCAGAGGCAGCAGGAGGACCAAGCGTGTTCCTGTTTCCACCCAAGCC |
| | | | CAAAGACACCCTGATGATTAGCCGAACCCCTGAAGTCACATGCGTGGTC |
| | | | GTGTCCGTGTCTCACGAGGACCCAGAAGTCAAGTTCAACTGGTACGTGG |
| | | | ATGGCGTCGAGGTGCATAATGCCAAGACAAAACCCCGGGAGGAACAGT |
| | | | ACAACAGCACCTATAGAGTCGTGTCCGTCCTGACAGTGCTGCACCAGGA |
| | | | TTGGCTGAACGGCAAGGAATATAAGTGCAAAGTGTCCAATAAGGCCCT |
| | | | GCCCGCTCCTATCGAGAAAACCATTTCTAAGGCAAAAGGCCAGCCTCGC |
| | | | GAACCACAGGTCTACGTGCTGCCTCCATCCCGGGACGAGCTGACAAAG |
| | | | AACCAGGTCTCTCTGCTGTGCCTGGTGAAAGGCTTCTATCCATCAGATA |
| | | | TTGCTGTGGAGTGGGAAAGCAATGGGCAGCCCGAGAACAATTACCTGA |
| | | | CTTGGCCCCCTGTGCTGGACTCTGATGGGAGTTTCTTTCTGTATTCTAAG |
| | | | CTGACCGTGGATAAAAGTAGGTGGCAGCAGGGAAATGTCTTTAGTTGTT |
| | | | CAGTGATGCATGAAGCCCTGCATAACCACTACACCCAGAAAAGCCTGT |
| | | | CCCTGTCCCCCGGA |
| 135 | 22206 | Full nt | CAGGTGCAGCTGGTGGAGAGCGGCGGCGGCGTGGTGCAGCCTGGCCGG |
| | | | TCCCTGAGACTGTCTTGCGCAGCCAGCGGCGTGACCTTTAGCTCCTACG |
| | | | GCATGCACTGGGTGCGGCAGGCCCCTGGCAAGGGACTGGAGTGGGTGG |
| | | | CCTTCATCAGATATGACGGCTCTAACAAGTACTATGCCGATAGCGTGAA |
| | | | GGGCAGGTTTACCATCTCCCGCGACAACTCTAAGAATACACTGTACCTG |
| | | | CAGATGAACTCCCTGCGGGCAGAGGACACCGCCGTGTACTATTGCAAG |
| | | | ACACACGGCTCTCACGATAATTGGGGCCAGGGCACCATGGTGACAGTG |
| | | | TCTAGCGGAGGAGGAGGCAGCGGAGGAGGAGGCTCCGGCGGCGGCGG |
| | | | CAGCCAGTCCGTGCTGACCCAGCCACCTTCTGTGAGCGGAGCCCCCGGA |
| | | | CAGAGGGTGACAATCTCCTGTTCTGGCAGCCGCTCCAACATCGGCAGCA |
| | | | ATACCGTGAAGTGGTATCAGCAGCTGCCTGGCACAGCCCCAAAGCTGCT |
| | | | GATCTACTATAATGACCAGAGACCCTCCGGCGTGCCTGATAGATTCTCT |
| | | | GGCAGCAAGTCCGGCACCTCTGCCAGCCTGGCCATCACAGGACTGCAG |
| | | | GCAGAGGACGAGGCAGATTACTATTGTCAGTCCTACGACAGATATACC |
| | | | CACCCAGCCCTGCTGTTTGGCACCGGCACAAAGGTGACAGTGCTGGCCG |
| | | | CCGAGCCCAAGTCCTCTGATAAGACCCACACATGCCCACCCTGTCCGGC |
| | | | GCCAGAGGCAGCAGGAGGACCAAGCGTGTTCCTGTTTCCACCCAAGCC |
| | | | CAAAGACACCCTGATGATTAGCCGAACCCCTGAAGTCACATGCGTGGTC |
| | | | GTGTCCGTGTCTCACGAGGACCCAGAAGTCAAGTTCAACTGGTACGTGG |
| | | | ATGGCGTCGAGGTGCATAATGCCAAGACAAAACCCCGGGAGGAACAGT |
| | | | ACAACAGCACCTATAGAGTCGTGTCCGTCCTGACAGTGCTGCACCAGGA |
| | | | TTGGCTGAACGGCAAGGAATATAAGTGCAAAGTGTCCAATAAGGCCCT |
| | | | GCCCGCTCCTATCGAGAAAACCATTTCTAAGGCAAAAGGCCAGCCTCGC |
| | | | GAACCACAGGTCTACGTGCTGCCTCCATCCCGGGACGAGCTGACAAAG |
| | | | AACCAGGTCTCTCTGCTGTGCCTGGTGAAAGGCTTCTATCCATCAGATA |
| | | | TTGCTGTGGAGTGGGAAAGCAATGGGCAGCCCGAGAACAATTACCTGA |
| | | | CTTGGCCCCCTGTGCTGGACTCTGATGGGAGTTTCTTTCTGTATTCTAAG |
| | | | CTGACCGTGGATAAAAGTAGGTGGCAGCAGGGAAATGTCTTTAGTTGTT |
| | | | CAGTGATGCATGAAGCCCTGCATAACCACTACACCCAGAAAAGCCTGT |
| | | | CCCTGTCCCCCGGA |
| 136 | 22207 | Full nt | CAGGTGCAGCTGGTGGAGAGCGGCGGCGGCGTGGTGCAGCCTGGCCGG |
| | | | TCCCTGAGACTGTCTTGCGCAGCCAGCGGCTTCACCTTTAGCTCCTACG |
| | | | GCATGCACTGGGTGCGGCAGGCCCCTGGCAAGGGACTGGAGTGGGTGG |
| | | | CCTTCATCAGAGTGGACGGCTCTAACAAGTACTATGCCGATAGCGTGAA |
| | | | GGGCAGGTTTACCATCTCCCGCGACAACTCTAAGAATACACTGTACCTG |
| | | | CAGATGAACTCCCTGCGGGCAGAGGACACCGCCGTGTACTATTGCAAG |
| | | | ACACACGGCTCTCACGATAATTGGGGCCAGGGCACCATGGTGACAGTG |
| | | | TCTAGCGGAGGAGGAGGCAGCGGAGGAGGAGGCTCCGGCGGCGGCGG |
| | | | CAGCCAGTCCGTGCTGACCCAGCCACCTTCTGTGAGCGGAGCCCCCGGA |
| | | | CAGAGGGTGACAATCTCCTGTTCTGGCAGCCGCTCCAACATCGGCAGCA |
| | | | ATACCGTGAAGTGGTATCAGCAGCTGCCTGGCACAGCCCCAAAGCTGCT |
| | | | GATCTACTATAATGACCAGAGACCCTCCGGCGTGCCTGATAGATTCTCT |
| | | | GGCAGCAAGTCCGGCACCTCTGCCAGCCTGGCCATCACAGGACTGCAG |
| | | | GCAGAGGACGAGGCAGATTACTATTGTCAGTCCTACGACAGATATACC |
| | | | CACCCAGCCCTGCTGTTTGGCACCGGCACAAAGGTGACAGTGCTGGCCG |
| | | | CCGAGCCCAAGTCCTCTGATAAGACCCACACATGCCCACCCTGTCCGGC |
| | | | GCCAGAGGCAGCAGGAGGACCAAGCGTGTTCCTGTTTCCACCCAAGCC |
| | | | CAAAGACACCCTGATGATTAGCCGAACCCCTGAAGTCACATGCGTGGTC |
| | | | GTGTCCGTGTCTCACGAGGACCCAGAAGTCAAGTTCAACTGGTACGTGG |
| | | | ATGGCGTCGAGGTGCATAATGCCAAGACAAAACCCCGGGAGGAACAGT |
| | | | ACAACAGCACCTATAGAGTCGTGTCCGTCCTGACAGTGCTGCACCAGGA |
| | | | TTGGCTGAACGGCAAGGAATATAAGTGCAAAGTGTCCAATAAGGCCCT |
| | | | GCCCGCTCCTATCGAGAAAACCATTTCTAAGGCAAAAGGCCAGCCTCGC |
| | | | GAACCACAGGTCTACGTGCTGCCTCCATCCCGGGACGAGCTGACAAAG |
| | | | AACCAGGTCTCTCTGCTGTGCCTGGTGAAAGGCTTCTATCCATCAGATA |
| | | | TTGCTGTGGAGTGGGAAAGCAATGGGCAGCCCGAGAACAATTACCTGA |
| | | | CTTGGCCCCCTGTGCTGGACTCTGATGGGAGTTTCTTTCTGTATTCTAAG |
| | | | CTGACCGTGGATAAAAGTAGGTGGCAGCAGGGAAATGTCTTTAGTTGTT |
| | | | CAGTGATGCATGAAGCCCTGCATAACCACTACACCCAGAAAAGCCTGT |
| | | | CCCTGTCCCCCGGA |
| 137 | 22208 | Full nt | CAGGTGCAGCTGGTGGAGAGCGGCGGCGGCGTGGTGCAGCCTGGCCGG |
| | | | TCCCTGAGACTGTCTTGCGCAGCCAGCGGCTTCACCTTTAGCTCCTACG |
| | | | GCATGCACTGGGTGCGGCAGGCCCCTGGCAAGGGACTGGAGTGGGTGG |
| | | | CCTTCATCGAGTATGACGGCTCTAACAAGTACTATGCCGATAGCGTGAA |
| | | | GGGCAGGTTTACCATCTCCCGCGACAACTCTAAGAATACACTGTACCTG |
| | | | CAGATGAACTCCCTGCGGGCAGAGGACACCGCCGTGTACTATTGCAAG |
| | | | ACACACGGCTCTCACGATAATTGGGGCCAGGGCACCATGGTGACAGTG |
| | | | TCTAGCGGAGGAGGAGGCAGCGGAGGAGGAGGCTCCGGCGGCGGCGG |
| | | | CAGCCAGTCCGTGCTGACCCAGCCACCTTCTGTGAGCGGAGCCCCCGGA |
| | | | CAGAGGGTGACAATCTCCTGTTCTGGCAGCCGCTCCAACATCGGCAGCA |
| | | | ATACCGTGAAGTGGTATCAGCAGCTGCCTGGCACAGCCCCAAAGCTGCT |
| | | | GATCTACTATAATGACCAGAGACCCTCCGGCGTGCCTGATAGATTCTCT |
| | | | GGCAGCAAGTCCGGCACCTCTGCCAGCCTGGCCATCACAGGACTGCAG |
| | | | GCAGAGGACGAGGCAGATTACTATTGTCAGTCCTACGACAGATATACC |
| | | | CACCCAGCCCTGCTGTTTGGCACCGGCACAAAGGTGACAGTGCTGGCCG |
| | | | CCGAGCCCAAGTCCTCTGATAAGACCCACACATGCCCACCCTGTCCGGC |
| | | | GCCAGAGGCAGCAGGAGGACCAAGCGTGTTCCTGTTTCCACCCAAGCC |
| | | | CAAAGACACCCTGATGATTAGCCGAACCCCTGAAGTCACATGCGTGGTC |
| | | | GTGTCCGTGTCTCACGAGGACCCAGAAGTCAAGTTCAACTGGTACGTGG |
| | | | ATGGCGTCGAGGTGCATAATGCCAAGACAAAACCCCGGGAGGAACAGT |
| | | | ACAACAGCACCTATAGAGTCGTGTCCGTCCTGACAGTGCTGCACCAGGA |
| | | | TTGGCTGAACGGCAAGGAATATAAGTGCAAAGTGTCCAATAAGGCCCT |
| | | | GCCCGCTCCTATCGAGAAAACCATTTCTAAGGCAAAAGGCCAGCCTCGC |
| | | | GAACCACAGGTCTACGTGCTGCCTCCATCCCGGGACGAGCTGACAAAG |
| | | | AACCAGGTCTCTCTGCTGTGCCTGGTGAAAGGCTTCTATCCATCAGATA |
| | | | TTGCTGTGGAGTGGGAAAGCAATGGGCAGCCCGAGAACAATTACCTGA |
| | | | CTTGGCCCCCTGTGCTGGACTCTGATGGGAGTTTCTTTCTGTATTCTAAG |
| | | | CTGACCGTGGATAAAAGTAGGTGGCAGCAGGGAAATGTCTTTAGTTGTT |
| | | | CAGTGATGCATGAAGCCCTGCATAACCACTACACCCAGAAAAGCCTGT |
| | | | CCCTGTCCCCCGGA |
| 138 | 22209 | Full nt | CAGGTGCAGCTGGTGGAGAGCGGCGGCGGCGTGGTGCAGCCTGGCCGG |
| | | | TCCCTGAGACTGTCTTGCGCAGCCAGCGGCTTCACCTTTAGCTCCTACG |
| | | | GCATGCACTGGGTGCGGCAGGCCCCTGGCAAGGGACTGGAGTGGGTGG |
| | | | CCTTCATCGAGGTGGACGGCTCTAACAAGTACTATGCCGATAGCGTGAA |
| | | | GGGCAGGTTTACCATCTCCCGCGACAACTCTAAGAATACACTGTACCTG |
| | | | CAGATGAACTCCCTGCGGGCAGAGGACACCGCCGTGTACTATTGCAAG |
| | | | ACACACGGCTCTCACGATAATTGGGGCCAGGGCACCATGGTGACAGTG |
| | | | TCTAGCGGAGGAGGAGGCAGCGGAGGAGGAGGCTCCGGCGGCGGCGG |
| | | | CAGCCAGTCCGTGCTGACCCAGCCACCTTCTGTGAGCGGAGCCCCCGGA |
| | | | CAGAGGGTGACAATCTCCTGTTCTGGCAGCCGCTCCAACATCGGCAGCA |
| | | | ATACCGTGAAGTGGTATCAGCAGCTGCCTGGCACAGCCCCAAAGCTGCT |
| | | | GATCTACTATAATGACCAGAGACCCTCCGGCGTGCCTGATAGATTCTCT |
| | | | GGCAGCAAGTCCGGCACCTCTGCCAGCCTGGCCATCACAGGACTGCAG |
| | | | GCAGAGGACGAGGCAGATTACTATTGTCAGTCCTACGACAGATATACC |
| | | | CACCCAGCCCTGCTGTTTGGCACCGGCACAAAGGTGACAGTGCTGGCCG |
| | | | CCGAGCCCAAGTCCTCTGATAAGACCCACACATGCCCACCCTGTCCGGC |
| | | | GCCAGAGGCAGCAGGAGGACCAAGCGTGTTCCTGTTTCCACCCAAGCC |
| | | | CAAAGACACCCTGATGATTAGCCGAACCCCTGAAGTCACATGCGTGGTC |
| | | | GTGTCCGTGTCTCACGAGGACCCAGAAGTCAAGTTCAACTGGTACGTGG |
| | | | ATGGCGTCGAGGTGCATAATGCCAAGACAAAACCCCGGGAGGAACAGT |
| | | | ACAACAGCACCTATAGAGTCGTGTCCGTCCTGACAGTGCTGCACCAGGA |
| | | | TTGGCTGAACGGCAAGGAATATAAGTGCAAAGTGTCCAATAAGGCCCT |
| | | | GCCCGCTCCTATCGAGAAAACCATTTCTAAGGCAAAAGGCCAGCCTCGC |
| | | | GAACCACAGGTCTACGTGCTGCCTCCATCCCGGGACGAGCTGACAAAG |
| | | | AACCAGGTCTCTCTGCTGTGCCTGGTGAAAGGCTTCTATCCATCAGATA |
| | | | TTGCTGTGGAGTGGGAAAGCAATGGGCAGCCCGAGAACAATTACCTGA |
| | | | CTTGGCCCCCTGTGCTGGACTCTGATGGGAGTTTCTTTCTGTATTCTAAG |
| | | | CTGACCGTGGATAAAAGTAGGTGGCAGCAGGGAAATGTCTTTAGTTGTT |
| | | | CAGTGATGCATGAAGCCCTGCATAACCACTACACCCAGAAAAGCCTGT |
| | | | CCCTGTCCCCCGGA |
| 139 | 22211 | Full nt | CAGGTGCAGCTGGTGGAGAGCGGCGGCGGCGTGGTGCAGCCTGGCCGG |
| | | | TCCCTGAGACTGTCTTGCGCAGCCAGCGGCTTCACCTTTAGCTCCTACG |
| | | | GCATGCACTGGGTGCGGCAGGCCCCTGGCAAGGGACTGGAGTGGGTGG |
| | | | CCTTCATCAGATATGACGGCTCTAACAAGTACTATGCCGATAGCGTGAA |
| | | | GGGCAGGTTTACCATCTCCCGCGACAACTCTAAGAATACACTGTACCTG |
| | | | CAGATGAACTCCCTGCGGGCAGAGGACACCGCCGTGTACTATTGCAAG |
| | | | ACAGACGGCTCTCACGATAATTGGGGCCAGGGCACCATGGTGACAGTG |
| | | | TCTAGCGGAGGAGGAGGCAGCGGAGGAGGAGGCTCCGGCGGCGGCGG |
| | | | CAGCCAGTCCGTGCTGACCCAGCCACCTTCTGTGAGCGGAGCCCCCGGA |
| | | | CAGAGGGTGACAATCTCCTGTTCTGGCAGCCGCTCCAACATCGGCAGCA |
| | | | ATACCGTGAAGTGGTATCAGCAGCTGCCTGGCACAGCCCCAAAGCTGCT |
| | | | GATCTACTATAATGACCAGAGACCCTCCGGCGTGCCTGATAGATTCTCT |
| | | | GGCAGCAAGTCCGGCACCTCTGCCAGCCTGGCCATCACAGGACTGCAG |
| | | | GCAGAGGACGAGGCAGATTACTATTGTCAGTCCTACGACAGATATACC |
| | | | CACCCAGCCCTGCTGTTTGGCACCGGCACAAAGGTGACAGTGCTGGCCG |
| | | | CCGAGCCCAAGTCCTCTGATAAGACCCACACATGCCCACCCTGTCCGGC |
| | | | GCCAGAGGCAGCAGGAGGACCAAGCGTGTTCCTGTTTCCACCCAAGCC |
| | | | CAAAGACACCCTGATGATTAGCCGAACCCCTGAAGTCACATGCGTGGTC |
| | | | GTGTCCGTGTCTCACGAGGACCCAGAAGTCAAGTTCAACTGGTACGTGG |
| | | | ATGGCGTCGAGGTGCATAATGCCAAGACAAAACCCCGGGAGGAACAGT |
| | | | ACAACAGCACCTATAGAGTCGTGTCCGTCCTGACAGTGCTGCACCAGGA |
| | | | TTGGCTGAACGGCAAGGAATATAAGTGCAAAGTGTCCAATAAGGCCCT |
| | | | GCCCGCTCCTATCGAGAAAACCATTTCTAAGGCAAAAGGCCAGCCTCGC |
| | | | GAACCACAGGTCTACGTGCTGCCTCCATCCCGGGACGAGCTGACAAAG |
| | | | AACCAGGTCTCTCTGCTGTGCCTGGTGAAAGGCTTCTATCCATCAGATA |
| | | | TTGCTGTGGAGTGGGAAAGCAATGGGCAGCCCGAGAACAATTACCTGA |
| | | | CTTGGCCCCCTGTGCTGGACTCTGATGGGAGTTTCTTTCTGTATTCTAAG |
| | | | CTGACCGTGGATAAAAGTAGGTGGCAGCAGGGAAATGTCTTTAGTTGTT |
| | | | CAGTGATGCATGAAGCCCTGCATAACCACTACACCCAGAAAAGCCTGT |
| | | | CCCTGTCCCCCGGA |
| 140 | 22212 | Full nt | CAGGTGCAGCTGGTGGAGAGCGGCGGCGGCGTGGTGCAGCCTGGCCGG |
| | | | TCCCTGAGACTGTCTTGCGCAGCCAGCGGCTTCACCTTTAGCTCCTACG |
| | | | GCATGCACTGGGTGCGGCAGGCCCCTGGCAAGGGACTGGAGTGGGTGG |
| | | | CCTTCATCAGATATGACGGCTCTAACAAGTACTATGCCGATAGCGTGAA |
| | | | GGGCAGGTTTACCATCTCCCGCGACAACTCTAAGAATACACTGTACCTG |
| | | | CAGATGAACTCCCTGCGGGCAGAGGACACCGCCGTGTACTATTGCAAG |
| | | | ACACACACCTCTCACGATAATTGGGGCCAGGGCACCATGGTGACAGTG |
| | | | TCTAGCGGAGGAGGAGGCAGCGGAGGAGGAGGCTCCGGCGGCGGCGG |
| | | | CAGCCAGTCCGTGCTGACCCAGCCACCTTCTGTGAGCGGAGCCCCCGGA |
| | | | CAGAGGGTGACAATCTCCTGTTCTGGCAGCCGCTCCAACATCGGCAGCA |
| | | | ATACCGTGAAGTGGTATCAGCAGCTGCCTGGCACAGCCCCAAAGCTGCT |
| | | | GATCTACTATAATGACCAGAGACCCTCCGGCGTGCCTGATAGATTCTCT |
| | | | GGCAGCAAGTCCGGCACCTCTGCCAGCCTGGCCATCACAGGACTGCAG |
| | | | GCAGAGGACGAGGCAGATTACTATTGTCAGTCCTACGACAGATATACC |
| | | | CACCCAGCCCTGCTGTTTGGCACCGGCACAAAGGTGACAGTGCTGGCCG |
| | | | CCGAGCCCAAGTCCTCTGATAAGACCCACACATGCCCACCCTGTCCGGC |
| | | | GCCAGAGGCAGCAGGAGGACCAAGCGTGTTCCTGTTTCCACCCAAGCC |
| | | | CAAAGACACCCTGATGATTAGCCGAACCCCTGAAGTCACATGCGTGGTC |
| | | | GTGTCCGTGTCTCACGAGGACCCAGAAGTCAAGTTCAACTGGTACGTGG |
| | | | ATGGCGTCGAGGTGCATAATGCCAAGACAAAACCCCGGGAGGAACAGT |
| | | | ACAACAGCACCTATAGAGTCGTGTCCGTCCTGACAGTGCTGCACCAGGA |
| | | | TTGGCTGAACGGCAAGGAATATAAGTGCAAAGTGTCCAATAAGGCCCT |
| | | | GCCCGCTCCTATCGAGAAAACCATTTCTAAGGCAAAAGGCCAGCCTCGC |
| | | | GAACCACAGGTCTACGTGCTGCCTCCATCCCGGGACGAGCTGACAAAG |
| | | | AACCAGGTCTCTCTGCTGTGCCTGGTGAAAGGCTTCTATCCATCAGATA |
| | | | TTGCTGTGGAGTGGGAAAGCAATGGGCAGCCCGAGAACAATTACCTGA |
| | | | CTTGGCCCCCTGTGCTGGACTCTGATGGGAGTTTCTTTCTGTATTCTAAG |
| | | | CTGACCGTGGATAAAAGTAGGTGGCAGCAGGGAAATGTCTTTAGTTGTT |
| | | | CAGTGATGCATGAAGCCCTGCATAACCACTACACCCAGAAAAGCCTGT |
| | | | CCCTGTCCCCCGGA |
| 141 | 22214 | Full nt | CAGGTGCAGCTGGTGGAGAGCGGCGGCGGCGTGGTGCAGCCTGGCCGG |
| | | | TCCCTGAGACTGTCTTGCGCAGCCAGCGGCTTCACCTTTAGCTCCTACG |
| | | | GCATGCACTGGGTGCGGCAGGCCCCTGGCAAGGGACTGGAGTGGGTGG |
| | | | CCTTCATCAGATATGACGGCTCTAACAAGTACTATGCCGATAGCGTGAA |
| | | | GGGCAGGTTTACCATCTCCCGCGACAACTCTAAGAATACACTGTACCTG |
| | | | CAGATGAACTCCCTGCGGGCAGAGGACACCGCCGTGTACTATTGCAAG |
| | | | ACACACGGCTCTGCCGATAATTGGGGCCAGGGCACCATGGTGACAGTG |
| | | | TCTAGCGGAGGAGGAGGCAGCGGAGGAGGAGGCTCCGGCGGCGGCGG |
| | | | CAGCCAGTCCGTGCTGACCCAGCCACCTTCTGTGAGCGGAGCCCCCGGA |
| | | | CAGAGGGTGACAATCTCCTGTTCTGGCAGCCGCTCCAACATCGGCAGCA |
| | | | ATACCGTGAAGTGGTATCAGCAGCTGCCTGGCACAGCCCCAAAGCTGCT |
| | | | GATCTACTATAATGACCAGAGACCCTCCGGCGTGCCTGATAGATTCTCT |
| | | | GGCAGCAAGTCCGGCACCTCTGCCAGCCTGGCCATCACAGGACTGCAG |
| | | | GCAGAGGACGAGGCAGATTACTATTGTCAGTCCTACGACAGATATACC |
| | | | CACCCAGCCCTGCTGTTTGGCACCGGCACAAAGGTGACAGTGCTGGCCG |
| | | | CCGAGCCCAAGTCCTCTGATAAGACCCACACATGCCCACCCTGTCCGGC |
| | | | GCCAGAGGCAGCAGGAGGACCAAGCGTGTTCCTGTTTCCACCCAAGCC |
| | | | CAAAGACACCCTGATGATTAGCCGAACCCCTGAAGTCACATGCGTGGTC |
| | | | GTGTCCGTGTCTCACGAGGACCCAGAAGTCAAGTTCAACTGGTACGTGG |
| | | | ATGGCGTCGAGGTGCATAATGCCAAGACAAAACCCCGGGAGGAACAGT |
| | | | ACAACAGCACCTATAGAGTCGTGTCCGTCCTGACAGTGCTGCACCAGGA |
| | | | TTGGCTGAACGGCAAGGAATATAAGTGCAAAGTGTCCAATAAGGCCCT |
| | | | GCCCGCTCCTATCGAGAAAACCATTTCTAAGGCAAAAGGCCAGCCTCGC |
| | | | GAACCACAGGTCTACGTGCTGCCTCCATCCCGGGACGAGCTGACAAAG |
| | | | AACCAGGTCTCTCTGCTGTGCCTGGTGAAAGGCTTCTATCCATCAGATA |
| | | | TTGCTGTGGAGTGGGAAAGCAATGGGCAGCCCGAGAACAATTACCTGA |
| | | | CTTGGCCCCCTGTGCTGGACTCTGATGGGAGTTTCTTTCTGTATTCTAAG |
| | | | CTGACCGTGGATAAAAGTAGGTGGCAGCAGGGAAATGTCTTTAGTTGTT |
| | | | CAGTGATGCATGAAGCCCTGCATAACCACTACACCCAGAAAAGCCTGT |
| | | | CCCTGTCCCCCGGA |
| 142 | 22279 | Full nt | GAGCCAAAGAGCTCCGACAAGACCCACACATGCCCCCCTTGTCCGGCG |
| | | | CCAGAGGCTGCAGGAGGACCAAGCGTGTTCCTGTTTCCACCCAAGCCTA |
| | | | AAGACACACTGATGATTTCCCGAACCCCCGAAGTCACATGCGTGGTCGT |
| | | | GTCTGTGAGTCACGAGGACCCTGAAGTCAAGTTCAACTGGTACGTGGAT |
| | | | GGCGTCGAGGTGCATAATGCCAAGACTAAACCTAGGGAGGAACAGTAC |
| | | | AACTCAACCTATCGCGTCGTGAGCGTCCTGACAGTGCTGCACCAGGATT |
| | | | GGCTGAACGGCAAAGAATATAAGTGCAAAGTGAGCAATAAGGCCCTGC |
| | | | CCGCTCCTATCGAGAAAACCATTTCCAAGGCTAAAGGGCAGCCTCGCG |
| | | | AACCTCAGGTGTACGTGTATCCACCCTCCCGCGATGAGCTGACAAAGAA |
| | | | CCAGGTGTCTCTGACCTGTCTGGTGAAGGGCTTTTACCCTAGCGACATC |
| | | | GCCGTGGAGTGGGAGTCCAATGGCCAGCCAGAGAACAATTATAAGACC |
| | | | ACACCTCCAGTGCTGGACTCTGATGGCAGCTTCGCCCTGGTGTCTAAGC |
| | | | TGACAGTGGACAAGAGCAGATGGCAGCAGGGCAACGTGTTTTCTTGTA |
| | | | GCGTGATGCACGAGGCCCTGCACAATCACTACACCCAGAAGTCCCTGA |
| | | | GCTTAAGCCCTGGAGGCAGCGCCGATGGAGGAATCTGGGAGCTGAAGA |
| | | | AGGACGTGTACGTGGTGGAGCTGGACTGGTATCCAGATGCACCAGGAG |
| | | | AGATGGTGGTGCTGACCTGCGACACACCAGAGGAGGATGGCATCACCT |
| | | | GGACACTGGATCAGAGCTCCGAGGTGCTGGGCTCCGGCAAGACCCTGA |
| | | | CAATCCAGGTGAAGGAGTTCGGCGACGCCGGACAGTACACCTGTCACA |
| | | | AGGGCGGCGAGGTGCTGTCCCACTCTCTGCTGCTGCTGCACAAGAAGG |
| | | | AGGACGGCATCTGGAGCACAGACATCCTGAAGGATCAGAAGGAGCCCA |
| | | | AGAACAAGACCTTCCTGAGGTGCGAGGCCAAGAATTATAGCGGCAGAT |
| | | | TCACCTGTTGGTGGCTGACCACAATCTCCACCGATCTGACATTTTCTGTG |
| | | | AAGTCTAGCAGGGGCTCCTCTGACCCTCAGGGAGTGACATGCGGAGCC |
| | | | GCCACCCTGAGCGCCGAGCGGGTGAGAGGCGATAACAAGGAGTACGAG |
| | | | TATTCCGTGGAGTGCCAGGAGGACTCTGCCTGTCCCGCCGCCGAGGAGT |
| | | | CCCTGCCTATCGAAGTGATGGTGGATGCCGTGCACAAGCTGAAGTACG |
| | | | AGAATTATACAAGCTCCTTCTTTATCAGGGACATCATCAAGCCCGATCC |
| | | | CCCTAAGAACCTGCAGCTGAAGCCTCTGAAGAATAGCCGCCAGGTGGA |
| | | | GGTGTCCTGGGAGTACCCTGACACCTGGAGCACACCACACTCCTATTTC |
| | | | TCTCTGACCTTTTGCGTGCAGGTGCAGGGCAAGTCTAAGAGGGAGAAG |
| | | | AAGGACCGCGTGTTCACCGATAAGACAAGCGCCACCGTGATCTGTCGG |
| | | | AAGAACGCCAGCATCTCCGTGCGGGCCCAGGATAGATACTATTCTAGCT |
| | | | CCTGGAGCGAGTGGGCCTCCGTGCCATGTTCTGGAGGAGGAGGCAGCG |
| | | | GCGGAGGAGGCTCCGGCGGCGGCGGCTCTAATCTGCCAGTGGCCACCC |
| | | | CTGACCCAGGCATGTTCCCCTGCCTGCACCACTCTCAGAACCTGCTGCG |
| | | | GGCCGTGAGCAATATGCTGCAGAAGGCCAGACAGACACTGGAGTTTTA |
| | | | CCCATGTACCTCCGAGGAGATCGACCACGAGGATATCACAAAGGATAA |
| | | | GACCTCTACAGTGGAGGCATGCCTGCCACTGGAGCTGACCAAGAACGA |
| | | | GAGCTGTCTGAACAGCCGGGAGACATCTTTCATCACCAACGGCAGCTGC |
| | | | CTGGCCTCCAGAAAGACATCTTTTATGATGGCCCTGTGCCTGTCTAGCA |
| | | | TCTACGAGGACCTGAAGATGTATCAGGTGGAGTTCAAGACCATGAACG |
| | | | CCAAGCTGCTGATGGACCCTAAGAGGCAGATCTTTCTGGATCAGAATAT |
| | | | GCTGGCCGTGATCGACGAGCTGATGCAGGCCCTGAACTTCAATAGCGA |
| | | | GACAGTGCCACAGAAGTCCTCTCTGGAGGAGCCCGATTTCTACAAGACC |
| | | | AAGATCAAGCTGTGCATCCTGCTGCACGCCTTCCGGATCAGAGCCGTGA |
| | | | CCATCGACCGCGTGATGAGCTACCTGAACGCCAGC |
| 143 | 22289 | Full nt | GAGCCAAAGAGCTCCGACAAGACCCACACATGCCCCCCTTGTCCGGCG |
| | | | CCAGAGGCTGCAGGAGGACCAAGCGTGTTCCTGTTTCCACCCAAGCCTA |
| | | | AAGACACACTGATGATTTCCCGAACCCCCGAAGTCACATGCGTGGTCGT |
| | | | GTCTGTGAGTCACGAGGACCCTGAAGTCAAGTTCAACTGGTACGTGGAT |
| | | | GGCGTCGAGGTGCATAATGCCAAGACTAAACCTAGGGAGGAACAGTAC |
| | | | AACTCAACCTATCGCGTCGTGAGCGTCCTGACAGTGCTGCACCAGGATT |
| | | | GGCTGAACGGCAAAGAATATAAGTGCAAAGTGAGCAATAAGGCCCTGC |
| | | | CCGCTCCTATCGAGAAAACCATTTCCAAGGCTAAAGGGCAGCCTCGCG |
| | | | AACCTCAGGTGTACGTGTATCCACCCTCCCGCGATGAGCTGACAAAGAA |
| | | | CCAGGTGTCTCTGACCTGTCTGGTGAAGGGCTTTTACCCTAGCGACATC |
| | | | GCCGTGGAGTGGGAGTCCAATGGCCAGCCAGAGAACAATTATAAGACC |
| | | | ACACCTCCAGTGCTGGACTCTGATGGCAGCTTCGCCCTGGTGTCTAAGC |
| | | | TGACAGTGGACAAGAGCAGATGGCAGCAGGGCAACGTGTTTTCTTGTA |
| | | | GCGTGATGCACGAGGCCCTGCACAATCACTACACCCAGAAGTCCCTGA |
| | | | GCTTAAGCCCTGGAGGCAGCGCCGATGGAGGAATCTGGGAGCTGAAGA |
| | | | AGGACGTGTACGTGGTGGAGCTGGACTGGTATCCAGATGCACCAGGAG |
| | | | AGATGGTGGTGCTGACCTGCGACACACCAGAGGAGGATGGCATCACCT |
| | | | GGACACTGGATCAGAGCTCCGAGGTGCTGGGCTCCGGCAAGACCCTGA |
| | | | CAATCCAGGTGAAGGAGTTCGGCGACGCCGGACAGTACACCTGTCACA |
| | | | AGGGCGGCGAGGTGCTGTCCCACTCTCTGCTGCTGCTGCACAAGAAGG |
| | | | AGGACGGCATCTGGAGCACAGACATCCTGAAGGATCAGAAGGAGCCCA |
| | | | AGAACAAGACCTTCCTGAGGTGCGAGGCCAAGAATTATAGCGGCAGAT |
| | | | TCACCTGTTGGTGGCTGACCACAATCTCCACCGATCTGACATTTTCTGTG |
| | | | AAGTCTAGCAGGGGCTCCTCTGACCCTCAGGGAGTGACATGCGGAGCC |
| | | | GCCACCCTGAGCGCCGAGCGGGTGAGAGGCGATAACAAGGAGTACGAG |
| | | | TATTCCGTGGAGTGCCAGGAGGACTCTGCCTGTCCCGCCGCCGAGGAGT |
| | | | CCCTGCCTATCGAAGTGATGGTGGATGCCGTGCACAAGCTGAAGTACG |
| | | | AGAATTATACAAGCTCCTTCTTTATCAGGGACATCATCAAGCCCGATCC |
| | | | CCCTAAGAACCTGCAGCTGAAGCCTCTGAAGAATAGCCGCCAGGTGGA |
| | | | GGTGTCCTGGGAGTACCCTGACACCTGGAGCACACCACACTCCTATTTC |
| | | | TCTCTGACCTTTTGCGTGCAGGTGAGAGACGACTCTGAGGACCGCGTGT |
| | | | TCACCGATAAGACAAGCGCCACCGTGATCTGTCGGAAGAACGCCAGCA |
| | | | TCTCCGTGCGGGCCCAGGATAGATACTATTCTAGCTCCTGGAGCGAGTG |
| | | | GGCCTCCGTGCCATGTTCTGGAGGAGGAGGCAGCGGCGGAGGAGGCTC |
| | | | CGGCGGCGGCGGCTCTAATCTGCCAGTGGCCACCCCTGACCCAGGCATG |
| | | | TTCCCCTGCCTGCACCACTCTCAGAACCTGCTGCGGGCCGTGAGCAATA |
| | | | TGCTGCAGAAGGCCAGACAGACACTGGAGTTTTACCCATGTACCTCCGA |
| | | | GGAGATCGACCACGAGGATATCACAAAGGATAAGACCTCTACAGTGGA |
| | | | GGCATGCCTGCCACTGGAGCTGACCAAGAACGAGAGCTGTCTGAACAG |
| | | | CCGGGAGACATCTTTCATCACCAACGGCAGCTGCCTGGCCTCCAGAAAG |
| | | | ACATCTTTTATGATGGCCCTGTGCCTGTCTAGCATCTACGAGGACCTGA |
| | | | AGATGTATCAGGTGGAGTTCAAGACCATGAACGCCAAGCTGCTGATGG |
| | | | ACCCTAAGAGGCAGATCTTTCTGGATCAGAATATGCTGGCCGTGATCGA |
| | | | CGAGCTGATGCAGGCCCTGAACTTCAATAGCGAGACAGTGCCACAGAA |
| | | | GTCCTCTCTGGAGGAGCCCGATTTCTACAAGACCAAGATCAAGCTGTGC |
| | | | ATCCTGCTGCACGCCTTCCGGATCAGAGCCGTGACCATCGACCGCGTGA |
| | | | TGAGCTACCTGAACGCCAGC |
| 144 | 22290 | Full nt | GAGCCAAAGAGCTCCGACAAGACCCACACATGCCCCCCTTGTCCGGCG |
| | | | CCAGAGGCTGCAGGAGGACCAAGCGTGTTCCTGTTTCCACCCAAGCCTA |
| | | | AAGACACACTGATGATTTCCCGAACCCCCGAAGTCACATGCGTGGTCGT |
| | | | GTCTGTGAGTCACGAGGACCCTGAAGTCAAGTTCAACTGGTACGTGGAT |
| | | | GGCGTCGAGGTGCATAATGCCAAGACTAAACCTAGGGAGGAACAGTAC |
| | | | AACTCAACCTATCGCGTCGTGAGCGTCCTGACAGTGCTGCACCAGGATT |
| | | | GGCTGAACGGCAAAGAATATAAGTGCAAAGTGAGCAATAAGGCCCTGC |
| | | | CCGCTCCTATCGAGAAAACCATTTCCAAGGCTAAAGGGCAGCCTCGCG |
| | | | AACCTCAGGTGTACGTGTATCCACCCTCCCGCGATGAGCTGACAAAGAA |
| | | | CCAGGTGTCTCTGACCTGTCTGGTGAAGGGCTTTTACCCTAGCGACATC |
| | | | GCCGTGGAGTGGGAGTCCAATGGCCAGCCAGAGAACAATTATAAGACC |
| | | | ACACCTCCAGTGCTGGACTCTGATGGCAGCTTCGCCCTGGTGTCTAAGC |
| | | | TGACAGTGGACAAGAGCAGATGGCAGCAGGGCAACGTGTTTTCTTGTA |
| | | | GCGTGATGCACGAGGCCCTGCACAATCACTACACCCAGAAGTCCCTGA |
| | | | GCTTAAGCCCTGGAGGCAGCGCCGATGGAGGAATCTGGGAGCTGAAGA |
| | | | AGGACGTGTACGTGGTGGAGCTGGACTGGTATCCAGATGCACCAGGAG |
| | | | AGATGGTGGTGCTGACCTGCGACACACCAGAGGAGGATGGCATCACCT |
| | | | GGACACTGGATCAGAGCTCCGAGGTGCTGGGCTCCGGCAAGACCCTGA |
| | | | CAATCCAGGTGAAGGAGTTCGGCGACGCCGGACAGTACACCTGTCACA |
| | | | AGGGCGGCGAGGTGCTGTCCCACTCTCTGCTGCTGCTGCACAAGAAGG |
| | | | AGGACGGCATCTGGAGCACAGACATCCTGAAGGATCAGAAGGAGCCCA |
| | | | AGAACAAGACCTTCCTGAGGTGCGAGGCCAAGAATTATAGCGGCAGAT |
| | | | TCACCTGTTGGTGGCTGACCACAATCTCCACCGATCTGACATTTTCTGTG |
| | | | AAGTCTAGCAGGGGCTCCTCTGACCCTCAGGGAGTGACATGCGGAGCC |
| | | | GCCACCCTGAGCGCCGAGCGGGTGAGAGGCGATAACAAGGAGTACGAG |
| | | | TATTCCGTGGAGTGCCAGGAGGACTCTGCCTGTCCCGCCGCCGAGGAGT |
| | | | CCCTGCCTATCGAAGTGATGGTGGATGCCGTGCACAAGCTGAAGTACG |
| | | | AGAATTATACAAGCTCCTTCTTTATCAGGGACATCATCAAGCCCGATCC |
| | | | CCCTAAGAACCTGCAGCTGAAGCCTCTGAAGAATAGCCGCCAGGTGGA |
| | | | GGTGTCCTGGGAGTACCCTGACACCTGGAGCACACCACACTCCTATTTC |
| | | | TCTCTGACCTTTTGCGTGCAGGTGCAGGGCAGCCAGGAGAAGAAGGAC |
| | | | CGCGTGTTCACCGATAAGACAAGCGCCACCGTGATCTGTCGGAAGAAC |
| | | | GCCAGCATCTCCGTGCGGGCCCAGGATAGATACTATTCTAGCTCCTGGA |
| | | | GCGAGTGGGCCTCCGTGCCATGTTCTGGAGGAGGAGGCAGCGGCGGAG |
| | | | GAGGCTCCGGCGGCGGCGGCTCTAATCTGCCAGTGGCCACCCCTGACCC |
| | | | AGGCATGTTCCCCTGCCTGCACCACTCTCAGAACCTGCTGCGGGCCGTG |
| | | | AGCAATATGCTGCAGAAGGCCAGACAGACACTGGAGTTTTACCCATGT |
| | | | ACCTCCGAGGAGATCGACCACGAGGATATCACAAAGGATAAGACCTCT |
| | | | ACAGTGGAGGCATGCCTGCCACTGGAGCTGACCAAGAACGAGAGCTGT |
| | | | CTGAACAGCCGGGAGACATCTTTCATCACCAACGGCAGCTGCCTGGCCT |
| | | | CCAGAAAGACATCTTTTATGATGGCCCTGTGCCTGTCTAGCATCTACGA |
| | | | GGACCTGAAGATGTATCAGGTGGAGTTCAAGACCATGAACGCCAAGCT |
| | | | GCTGATGGACCCTAAGAGGCAGATCTTTCTGGATCAGAATATGCTGGCC |
| | | | GTGATCGACGAGCTGATGCAGGCCCTGAACTTCAATAGCGAGACAGTG |
| | | | CCACAGAAGTCCTCTCTGGAGGAGCCCGATTTCTACAAGACCAAGATCA |
| | | | AGCTGTGCATCCTGCTGCACGCCTTCCGGATCAGAGCCGTGACCATCGA |
| | | | CCGCGTGATGAGCTACCTGAACGCCAGC |
| 145 | 22291 | Full nt | GAGCCAAAGAGCTCCGACAAGACCCACACATGCCCCCCTTGTCCGGCG |
| | | | CCAGAGGCTGCAGGAGGACCAAGCGTGTTCCTGTTTCCACCCAAGCCTA |
| | | | AAGACACACTGATGATTTCCCGAACCCCCGAAGTCACATGCGTGGTCGT |
| | | | GTCTGTGAGTCACGAGGACCCTGAAGTCAAGTTCAACTGGTACGTGGAT |
| | | | GGCGTCGAGGTGCATAATGCCAAGACTAAACCTAGGGAGGAACAGTAC |
| | | | AACTCAACCTATCGCGTCGTGAGCGTCCTGACAGTGCTGCACCAGGATT |
| | | | GGCTGAACGGCAAAGAATATAAGTGCAAAGTGAGCAATAAGGCCCTGC |
| | | | CCGCTCCTATCGAGAAAACCATTTCCAAGGCTAAAGGGCAGCCTCGCG |
| | | | AACCTCAGGTGTACGTGTATCCACCCTCCCGCGATGAGCTGACAAAGAA |
| | | | CCAGGTGTCTCTGACCTGTCTGGTGAAGGGCTTTTACCCTAGCGACATC |
| | | | GCCGTGGAGTGGGAGTCCAATGGCCAGCCAGAGAACAATTATAAGACC |
| | | | ACACCTCCAGTGCTGGACTCTGATGGCAGCTTCGCCCTGGTGTCTAAGC |
| | | | TGACAGTGGACAAGAGCAGATGGCAGCAGGGCAACGTGTTTTCTTGTA |
| | | | GCGTGATGCACGAGGCCCTGCACAATCACTACACCCAGAAGTCCCTGA |
| | | | GCTTAAGCCCTGGAGGCAGCGCCGATGGAGGAATCTGGGAGCTGAAGA |
| | | | AGGACGTGTACGTGGTGGAGCTGGACTGGTATCCAGATGCACCAGGAG |
| | | | AGATGGTGGTGCTGACCTGCGACACACCAGAGGAGGATGGCATCACCT |
| | | | GGACACTGGATCAGAGCTCCGAGGTGCTGGGCTCCGGCAAGACCCTGA |
| | | | CAATCCAGGTGAAGGAGTTCGGCGACGCCGGACAGTACACCTGTCACA |
| | | | AGGGCGGCGAGGTGCTGTCCCACTCTCTGCTGCTGCTGCACAAGAAGG |
| | | | AGGACGGCATCTGGAGCACAGACATCCTGAAGGATCAGAAGGAGCCCA |
| | | | AGAACAAGACCTTCCTGAGGTGCGAGGCCAAGAATTATAGCGGCAGAT |
| | | | TCACCTGTTGGTGGCTGACCACAATCTCCACCGATCTGACATTTTCTGTG |
| | | | AAGTCTAGCAGGGGCTCCTCTGACCCTCAGGGAGTGACATGCGGAGCC |
| | | | GCCACCCTGAGCGCCGAGCGGGTGAGAGGCGATAACAAGGAGTACGAG |
| | | | TATTCCGTGGAGTGCCAGGAGGACTCTGCCTGTCCCGCCGCCGAGGAGT |
| | | | CCCTGCCTATCGAAGTGATGGTGGATGCCGTGCACAAGCTGAAGTACG |
| | | | AGAATTATACAAGCTCCTTCTTTATCAGGGACATCATCAAGCCCGATCC |
| | | | CCCTAAGAACCTGCAGCTGAAGCCTCTGAAGAATAGCCGCCAGGTGGA |
| | | | GGTGTCCTGGGAGTACCCTGACACCTGGAGCACACCACACTCCTATTTC |
| | | | TCTCTGACCTTTTGCGTGCAGGTGCAGGGCGAGTCTAAGCAGGAGAAG |
| | | | AAGGACCGCGTGTTCACCGATAAGACAAGCGCCACCGTGATCTGTCGG |
| | | | AAGAACGCCAGCATCTCCGTGCGGGCCCAGGATAGATACTATTCTAGCT |
| | | | CCTGGAGCGAGTGGGCCTCCGTGCCATGTTCTGGAGGAGGAGGCAGCG |
| | | | GCGGAGGAGGCTCCGGCGGCGGCGGCTCTAATCTGCCAGTGGCCACCC |
| | | | CTGACCCAGGCATGTTCCCCTGCCTGCACCACTCTCAGAACCTGCTGCG |
| | | | GGCCGTGAGCAATATGCTGCAGAAGGCCAGACAGACACTGGAGTTTTA |
| | | | CCCATGTACCTCCGAGGAGATCGACCACGAGGATATCACAAAGGATAA |
| | | | GACCTCTACAGTGGAGGCATGCCTGCCACTGGAGCTGACCAAGAACGA |
| | | | GAGCTGTCTGAACAGCCGGGAGACATCTTTCATCACCAACGGCAGCTGC |
| | | | CTGGCCTCCAGAAAGACATCTTTTATGATGGCCCTGTGCCTGTCTAGCA |
| | | | TCTACGAGGACCTGAAGATGTATCAGGTGGAGTTCAAGACCATGAACG |
| | | | CCAAGCTGCTGATGGACCCTAAGAGGCAGATCTTTCTGGATCAGAATAT |
| | | | GCTGGCCGTGATCGACGAGCTGATGCAGGCCCTGAACTTCAATAGCGA |
| | | | GACAGTGCCACAGAAGTCCTCTCTGGAGGAGCCCGATTTCTACAAGACC |
| | | | AAGATCAAGCTGTGCATCCTGCTGCACGCCTTCCGGATCAGAGCCGTGA |
| | | | CCATCGACCGCGTGATGAGCTACCTGAACGCCAGC |
| 146 | 22292 | Full nt | GAGCCAAAGAGCTCCGACAAGACCCACACATGCCCCCCTTGTCCGGCG |
| | | | CCAGAGGCTGCAGGAGGACCAAGCGTGTTCCTGTTTCCACCCAAGCCTA |
| | | | AAGACACACTGATGATTTCCCGAACCCCCGAAGTCACATGCGTGGTCGT |
| | | | GTCTGTGAGTCACGAGGACCCTGAAGTCAAGTTCAACTGGTACGTGGAT |
| | | | GGCGTCGAGGTGCATAATGCCAAGACTAAACCTAGGGAGGAACAGTAC |
| | | | AACTCAACCTATCGCGTCGTGAGCGTCCTGACAGTGCTGCACCAGGATT |
| | | | GGCTGAACGGCAAAGAATATAAGTGCAAAGTGAGCAATAAGGCCCTGC |
| | | | CCGCTCCTATCGAGAAAACCATTTCCAAGGCTAAAGGGCAGCCTCGCG |
| | | | AACCTCAGGTGTACGTGTATCCACCCTCCCGCGATGAGCTGACAAAGAA |
| | | | CCAGGTGTCTCTGACCTGTCTGGTGAAGGGCTTTTACCCTAGCGACATC |
| | | | GCCGTGGAGTGGGAGTCCAATGGCCAGCCAGAGAACAATTATAAGACC |
| | | | ACACCTCCAGTGCTGGACTCTGATGGCAGCTTCGCCCTGGTGTCTAAGC |
| | | | TGACAGTGGACAAGAGCAGATGGCAGCAGGGCAACGTGTTTTCTTGTA |
| | | | GCGTGATGCACGAGGCCCTGCACAATCACTACACCCAGAAGTCCCTGA |
| | | | GCTTAAGCCCTGGAGGCAGCGCCGATGGAGGAATCTGGGAGCTGAAGA |
| | | | AGGACGTGTACGTGGTGGAGCTGGACTGGTATCCAGATGCACCAGGAG |
| | | | AGATGGTGGTGCTGACCTGCGACACACCAGAGGAGGATGGCATCACCT |
| | | | GGACACTGGATCAGAGCTCCGAGGTGCTGGGCTCCGGCAAGACCCTGA |
| | | | CAATCCAGGTGAAGGAGTTCGGCGACGCCGGACAGTACACCTGTCACA |
| | | | AGGGCGGCGAGGTGCTGTCCCACTCTCTGCTGCTGCTGCACAAGAAGG |
| | | | AGGACGGCATCTGGAGCACAGACATCCTGAAGGATCAGAAGGAGCCCA |
| | | | AGAACAAGACCTTCCTGAGGTGCGAGGCCAAGAATTATAGCGGCAGAT |
| | | | TCACCTGTTGGTGGCTGACCACAATCTCCACCGATCTGACATTTTCTGTG |
| | | | AAGTCTAGCAGGGGCTCCTCTGACCCTCAGGGAGTGACATGCGGAGCC |
| | | | GCCACCCTGAGCGCCGAGCGGGTGAGAGGCGATAACAAGGAGTACGAG |
| | | | TATTCCGTGGAGTGCCAGGAGGACTCTGCCTGTCCCGCCGCCGAGGAGT |
| | | | CCCTGCCTATCGAAGTGATGGTGGATGCCGTGCACAAGCTGAAGTACG |
| | | | AGAATTATACAAGCTCCTTCTTTATCAGGGACATCATCAAGCCCGATCC |
| | | | CCCTAAGAACCTGCAGCTGAAGCCTCTGAAGAATAGCCGCCAGGTGGA |
| | | | GGTGTCCTGGGAGTACCCTGACACCTGGAGCACACCACACTCCTATTTC |
| | | | TCTCTGACCTTTTGCGTGCAGGTGCAGGGCGAGAAGAAGGACCGCGTGT |
| | | | TCACCGATAAGACAAGCGCCACCGTGATCTGTCGGAAGAACGCCAGCA |
| | | | TCTCCGTGCGGGCCCAGGATAGATACTATTCTAGCTCCTGGAGCGAGTG |
| | | | GGCCTCCGTGCCATGTTCTGGAGGAGGAGGCAGCGGCGGAGGAGGCTC |
| | | | CGGCGGCGGCGGCTCTAATCTGCCAGTGGCCACCCCTGACCCAGGCATG |
| | | | TTCCCCTGCCTGCACCACTCTCAGAACCTGCTGCGGGCCGTGAGCAATA |
| | | | TGCTGCAGAAGGCCAGACAGACACTGGAGTTTTACCCATGTACCTCCGA |
| | | | GGAGATCGACCACGAGGATATCACAAAGGATAAGACCTCTACAGTGGA |
| | | | GGCATGCCTGCCACTGGAGCTGACCAAGAACGAGAGCTGTCTGAACAG |
| | | | CCGGGAGACATCTTTCATCACCAACGGCAGCTGCCTGGCCTCCAGAAAG |
| | | | ACATCTTTTATGATGGCCCTGTGCCTGTCTAGCATCTACGAGGACCTGA |
| | | | AGATGTATCAGGTGGAGTTCAAGACCATGAACGCCAAGCTGCTGATGG |
| | | | ACCCTAAGAGGCAGATCTTTCTGGATCAGAATATGCTGGCCGTGATCGA |
| | | | CGAGCTGATGCAGGCCCTGAACTTCAATAGCGAGACAGTGCCACAGAA |
| | | | GTCCTCTCTGGAGGAGCCCGATTTCTACAAGACCAAGATCAAGCTGTGC |
| | | | ATCCTGCTGCACGCCTTCCGGATCAGAGCCGTGACCATCGACCGCGTGA |
| | | | TGAGCTACCTGAACGCCAGC |
| 147 | 22293 | Full nt | GAGCCAAAGAGCTCCGACAAGACCCACACATGCCCCCCTTGTCCGGCG |
| | | | CCAGAGGCTGCAGGAGGACCAAGCGTGTTCCTGTTTCCACCCAAGCCTA |
| | | | AAGACACACTGATGATTTCCCGAACCCCCGAAGTCACATGCGTGGTCGT |
| | | | GTCTGTGAGTCACGAGGACCCTGAAGTCAAGTTCAACTGGTACGTGGAT |
| | | | GGCGTCGAGGTGCATAATGCCAAGACTAAACCTAGGGAGGAACAGTAC |
| | | | AACTCAACCTATCGCGTCGTGAGCGTCCTGACAGTGCTGCACCAGGATT |
| | | | GGCTGAACGGCAAAGAATATAAGTGCAAAGTGAGCAATAAGGCCCTGC |
| | | | CCGCTCCTATCGAGAAAACCATTTCCAAGGCTAAAGGGCAGCCTCGCG |
| | | | AACCTCAGGTGTACGTGTATCCACCCTCCCGCGATGAGCTGACAAAGAA |
| | | | CCAGGTGTCTCTGACCTGTCTGGTGAAGGGCTTTTACCCTAGCGACATC |
| | | | GCCGTGGAGTGGGAGTCCAATGGCCAGCCAGAGAACAATTATAAGACC |
| | | | ACACCTCCAGTGCTGGACTCTGATGGCAGCTTCGCCCTGGTGTCTAAGC |
| | | | TGACAGTGGACAAGAGCAGATGGCAGCAGGGCAACGTGTTTTCTTGTA |
| | | | GCGTGATGCACGAGGCCCTGCACAATCACTACACCCAGAAGTCCCTGA |
| | | | GCTTAAGCCCTGGAGGCAGCGCCGATGGAGGAATCTGGGAGCTGAAGA |
| | | | AGGACGTGTACGTGGTGGAGCTGGACTGGTATCCAGATGCACCAGGAG |
| | | | AGATGGTGGTGCTGACCTGCGACACACCAGAGGAGGATGGCATCACCT |
| | | | GGACACTGGATCAGAGCTCCGAGGTGCTGGGCTCCGGCAAGACCCTGA |
| | | | CAATCCAGGTGAAGGAGTTCGGCGACGCCGGACAGTACACCTGTCACA |
| | | | AGGGCGGCGAGGTGCTGTCCCACTCTCTGCTGCTGCTGCACAAGAAGG |
| | | | AGGACGGCATCTGGAGCACAGACATCCTGAAGGATCAGAAGGAGCCCA |
| | | | AGAACAAGACCTTCCTGAGGTGCGAGGCCAAGAATTATAGCGGCAGAT |
| | | | TCACCTGTTGGTGGCTGACCACAATCTCCACCGATCTGACATTTTCTGTG |
| | | | AAGTCTAGCAGGGGCTCCTCTGACCCTCAGGGAGTGACATGCGGAGCC |
| | | | GCCACCCTGAGCGCCGAGCGGGTGAGAGGCGATAACAAGGAGTACGAG |
| | | | TATTCCGTGGAGTGCCAGGAGGACTCTGCCTGTCCCGCCGCCGAGGAGT |
| | | | CCCTGCCTATCGAAGTGATGGTGGATGCCGTGCACAAGCTGAAGTACG |
| | | | AGAATTATACAAGCTCCTTCTTTATCAGGGACATCATCAAGCCCGATCC |
| | | | CCCTAAGAACCTGCAGCTGAAGCCTCTGAAGAATAGCCGCCAGGTGGA |
| | | | GGTGTCCTGGGAGTACCCTGACACCTGGAGCACACCACACTCCTATTTC |
| | | | TCTCTGACCTTTTGCGTGCAGGTGCAGGACCAGACCGACGACCGCGTGT |
| | | | TCACCGATAAGACAAGCGCCACCGTGATCTGTCGGAAGAACGCCAGCA |
| | | | TCTCCGTGCGGGCCCAGGATAGATACTATTCTAGCTCCTGGAGCGAGTG |
| | | | GGCCTCCGTGCCATGTTCTGGAGGAGGAGGCAGCGGCGGAGGAGGCTC |
| | | | CGGCGGCGGCGGCTCTAATCTGCCAGTGGCCACCCCTGACCCAGGCATG |
| | | | TTCCCCTGCCTGCACCACTCTCAGAACCTGCTGCGGGCCGTGAGCAATA |
| | | | TGCTGCAGAAGGCCAGACAGACACTGGAGTTTTACCCATGTACCTCCGA |
| | | | GGAGATCGACCACGAGGATATCACAAAGGATAAGACCTCTACAGTGGA |
| | | | GGCATGCCTGCCACTGGAGCTGACCAAGAACGAGAGCTGTCTGAACAG |
| | | | CCGGGAGACATCTTTCATCACCAACGGCAGCTGCCTGGCCTCCAGAAAG |
| | | | ACATCTTTTATGATGGCCCTGTGCCTGTCTAGCATCTACGAGGACCTGA |
| | | | AGATGTATCAGGTGGAGTTCAAGACCATGAACGCCAAGCTGCTGATGG |
| | | | ACCCTAAGAGGCAGATCTTTCTGGATCAGAATATGCTGGCCGTGATCGA |
| | | | CGAGCTGATGCAGGCCCTGAACTTCAATAGCGAGACAGTGCCACAGAA |
| | | | GTCCTCTCTGGAGGAGCCCGATTTCTACAAGACCAAGATCAAGCTGTGC |
| | | | ATCCTGCTGCACGCCTTCCGGATCAGAGCCGTGACCATCGACCGCGTGA |
| | | | TGAGCTACCTGAACGCCAGC |
| 148 | 22294 | Full nt | GAGCCAAAGAGCTCCGACAAGACCCACACATGCCCCCCTTGTCCGGCG |
| | | | CCAGAGGCTGCAGGAGGACCAAGCGTGTTCCTGTTTCCACCCAAGCCTA |
| | | | AAGACACACTGATGATTTCCCGAACCCCCGAAGTCACATGCGTGGTCGT |
| | | | GTCTGTGAGTCACGAGGACCCTGAAGTCAAGTTCAACTGGTACGTGGAT |
| | | | GGCGTCGAGGTGCATAATGCCAAGACTAAACCTAGGGAGGAACAGTAC |
| | | | AACTCAACCTATCGCGTCGTGAGCGTCCTGACAGTGCTGCACCAGGATT |
| | | | GGCTGAACGGCAAAGAATATAAGTGCAAAGTGAGCAATAAGGCCCTGC |
| | | | CCGCTCCTATCGAGAAAACCATTTCCAAGGCTAAAGGGCAGCCTCGCG |
| | | | AACCTCAGGTGTACGTGTATCCACCCTCCCGCGATGAGCTGACAAAGAA |
| | | | CCAGGTGTCTCTGACCTGTCTGGTGAAGGGCTTTTACCCTAGCGACATC |
| | | | GCCGTGGAGTGGGAGTCCAATGGCCAGCCAGAGAACAATTATAAGACC |
| | | | ACACCTCCAGTGCTGGACTCTGATGGCAGCTTCGCCCTGGTGTCTAAGC |
| | | | TGACAGTGGACAAGAGCAGATGGCAGCAGGGCAACGTGTTTTCTTGTA |
| | | | GCGTGATGCACGAGGCCCTGCACAATCACTACACCCAGAAGTCCCTGA |
| | | | GCTTAAGCCCTGGAGGCAGCGCCGATGGAGGAATCTGGGAGCTGAAGA |
| | | | AGGACGTGTACGTGGTGGAGCTGGACTGGTATCCAGATGCACCAGGAG |
| | | | AGATGGTGGTGCTGACCTGCGACACACCAGAGGAGGATGGCATCACCT |
| | | | GGACACTGGATCAGAGCTCCGAGGTGCTGGGCTCCGGCAAGACCCTGA |
| | | | CAATCCAGGTGAAGGAGTTCGGCGACGCCGGACAGTACACCTGTCACA |
| | | | AGGGCGGCGAGGTGCTGTCCCACTCTCTGCTGCTGCTGCACAAGAAGG |
| | | | AGGACGGCATCTGGAGCACAGACATCCTGAAGGATCAGAAGGAGCCCA |
| | | | AGAACAAGACCTTCCTGAGGTGCGAGGCCAAGAATTATAGCGGCAGAT |
| | | | TCACCTGTTGGTGGCTGACCACAATCTCCACCGATCTGACATTTTCTGTG |
| | | | AAGTCTAGCAGGGGCTCCTCTGACCCTCAGGGAGTGACATGCGGAGCC |
| | | | GCCACCCTGAGCGCCGAGCGGGTGAGAGGCGATAACAAGGAGTACGAG |
| | | | TATTCCGTGGAGTGCCAGGAGGACTCTGCCTGTCCCGCCGCCGAGGAGT |
| | | | CCCTGCCTATCGAAGTGATGGTGGATGCCGTGCACAAGCTGAAGTACG |
| | | | AGAATTATACAAGCTCCTTCTTTATCAGGGACATCATCAAGCCCGATCC |
| | | | CCCTAAGAACCTGCAGCTGAAGCCTCTGAAGAATAGCCGCCAGGTGGA |
| | | | GGTGTCCTGGGAGTACCCTGACACCTGGAGCACACCACACTCCTATTTC |
| | | | TCTCTGACCTTTTGCGTGCAGGTGCAGGACGACTCTGAGGACCGCGTGT |
| | | | TCACCGATAAGACAAGCGCCACCGTGATCTGTCGGAAGAACGCCAGCA |
| | | | TCTCCGTGCGGGCCCAGGATAGATACTATTCTAGCTCCTGGAGCGAGTG |
| | | | GGCCTCCGTGCCATGTTCTGGAGGAGGAGGCAGCGGCGGAGGAGGCTC |
| | | | CGGCGGCGGCGGCTCTAATCTGCCAGTGGCCACCCCTGACCCAGGCATG |
| | | | TTCCCCTGCCTGCACCACTCTCAGAACCTGCTGCGGGCCGTGAGCAATA |
| | | | TGCTGCAGAAGGCCAGACAGACACTGGAGTTTTACCCATGTACCTCCGA |
| | | | GGAGATCGACCACGAGGATATCACAAAGGATAAGACCTCTACAGTGGA |
| | | | GGCATGCCTGCCACTGGAGCTGACCAAGAACGAGAGCTGTCTGAACAG |
| | | | CCGGGAGACATCTTTCATCACCAACGGCAGCTGCCTGGCCTCCAGAAAG |
| | | | ACATCTTTTATGATGGCCCTGTGCCTGTCTAGCATCTACGAGGACCTGA |
| | | | AGATGTATCAGGTGGAGTTCAAGACCATGAACGCCAAGCTGCTGATGG |
| | | | ACCCTAAGAGGCAGATCTTTCTGGATCAGAATATGCTGGCCGTGATCGA |
| | | | CGAGCTGATGCAGGCCCTGAACTTCAATAGCGAGACAGTGCCACAGAA |
| | | | GTCCTCTCTGGAGGAGCCCGATTTCTACAAGACCAAGATCAAGCTGTGC |
| | | | ATCCTGCTGCACGCCTTCCGGATCAGAGCCGTGACCATCGACCGCGTGA |
| | | | TGAGCTACCTGAACGCCAGC |
| 149 | 22295 | Full nt | GAGCCAAAGAGCTCCGACAAGACCCACACATGCCCCCCTTGTCCGGCG |
| | | | CCAGAGGCTGCAGGAGGACCAAGCGTGTTCCTGTTTCCACCCAAGCCTA |
| | | | AAGACACACTGATGATTTCCCGAACCCCCGAAGTCACATGCGTGGTCGT |
| | | | GTCTGTGAGTCACGAGGACCCTGAAGTCAAGTTCAACTGGTACGTGGAT |
| | | | GGCGTCGAGGTGCATAATGCCAAGACTAAACCTAGGGAGGAACAGTAC |
| | | | AACTCAACCTATCGCGTCGTGAGCGTCCTGACAGTGCTGCACCAGGATT |
| | | | GGCTGAACGGCAAAGAATATAAGTGCAAAGTGAGCAATAAGGCCCTGC |
| | | | CCGCTCCTATCGAGAAAACCATTTCCAAGGCTAAAGGGCAGCCTCGCG |
| | | | AACCTCAGGTGTACGTGTATCCACCCTCCCGCGATGAGCTGACAAAGAA |
| | | | CCAGGTGTCTCTGACCTGTCTGGTGAAGGGCTTTTACCCTAGCGACATC |
| | | | GCCGTGGAGTGGGAGTCCAATGGCCAGCCAGAGAACAATTATAAGACC |
| | | | ACACCTCCAGTGCTGGACTCTGATGGCAGCTTCGCCCTGGTGTCTAAGC |
| | | | TGACAGTGGACAAGAGCAGATGGCAGCAGGGCAACGTGTTTTCTTGTA |
| | | | GCGTGATGCACGAGGCCCTGCACAATCACTACACCCAGAAGTCCCTGA |
| | | | GCTTAAGCCCTGGAGGCAGCGCCGATGGAGGAATCTGGGAGCTGAAGA |
| | | | AGGACGTGTACGTGGTGGAGCTGGACTGGTATCCAGATGCACCAGGAG |
| | | | AGATGGTGGTGCTGACCTGCGACACACCAGAGGAGGATGGCATCACCT |
| | | | GGACACTGGATCAGAGCTCCGAGGTGCTGGGCTCCGGCAAGACCCTGA |
| | | | CAATCCAGGTGAAGGAGTTCGGCGACGCCGGACAGTACACCTGTCACA |
| | | | AGGGCGGCGAGGTGCTGTCCCACTCTCTGCTGCTGCTGCACAAGAAGG |
| | | | AGGACGGCATCTGGAGCACAGACATCCTGAAGGATCAGAAGGAGCCCA |
| | | | AGAACAAGACCTTCCTGAGGTGCGAGGCCAAGAATTATAGCGGCAGAT |
| | | | TCACCTGTTGGTGGCTGACCACAATCTCCACCGATCTGACATTTTCTGTG |
| | | | AAGTCTAGCAGGGGCTCCTCTGACCCTCAGGGAGTGACATGCGGAGCC |
| | | | GCCACCCTGAGCGCCGAGCGGGTGAGAGGCGATAACAAGGAGTACGAG |
| | | | TATTCCGTGGAGTGCCAGGAGGACTCTGCCTGTCCCGCCGCCGAGGAGT |
| | | | CCCTGCCTATCGAAGTGATGGTGGATGCCGTGCACAAGCTGAAGTACG |
| | | | AGAATTATACAAGCTCCTTCTTTATCAGGGACATCATCAAGCCCGATCC |
| | | | CCCTAAGAACCTGCAGCTGAAGCCTCTGAAGAATAGCCGCCAGGTGGA |
| | | | GGTGTCCTGGGAGTACCCTGACACCTGGAGCACACCACACTCCTATTTC |
| | | | TCTCTGACCTTTTGCGTGCAGGTGAAGGACCAGACCGAGGACCGCGTGT |
| | | | TCACCGATAAGACAAGCGCCACCGTGATCTGTCGGAAGAACGCCAGCA |
| | | | TCTCCGTGCGGGCCCAGGATAGATACTATTCTAGCTCCTGGAGCGAGTG |
| | | | GGCCTCCGTGCCATGTTCTGGAGGAGGAGGCAGCGGCGGAGGAGGCTC |
| | | | CGGCGGCGGCGGCTCTAATCTGCCAGTGGCCACCCCTGACCCAGGCATG |
| | | | TTCCCCTGCCTGCACCACTCTCAGAACCTGCTGCGGGCCGTGAGCAATA |
| | | | TGCTGCAGAAGGCCAGACAGACACTGGAGTTTTACCCATGTACCTCCGA |
| | | | GGAGATCGACCACGAGGATATCACAAAGGATAAGACCTCTACAGTGGA |
| | | | GGCATGCCTGCCACTGGAGCTGACCAAGAACGAGAGCTGTCTGAACAG |
| | | | CCGGGAGACATCTTTCATCACCAACGGCAGCTGCCTGGCCTCCAGAAAG |
| | | | ACATCTTTTATGATGGCCCTGTGCCTGTCTAGCATCTACGAGGACCTGA |
| | | | AGATGTATCAGGTGGAGTTCAAGACCATGAACGCCAAGCTGCTGATGG |
| | | | ACCCTAAGAGGCAGATCTTTCTGGATCAGAATATGCTGGCCGTGATCGA |
| | | | CGAGCTGATGCAGGCCCTGAACTTCAATAGCGAGACAGTGCCACAGAA |
| | | | GTCCTCTCTGGAGGAGCCCGATTTCTACAAGACCAAGATCAAGCTGTGC |
| | | | ATCCTGCTGCACGCCTTCCGGATCAGAGCCGTGACCATCGACCGCGTGA |
| | | | TGAGCTACCTGAACGCCAGC |
| 150 | 22296 | Full nt | GAGCCAAAGAGCTCCGACAAGACCCACACATGCCCCCCTTGTCCGGCG |
| | | | CCAGAGGCTGCAGGAGGACCAAGCGTGTTCCTGTTTCCACCCAAGCCTA |
| | | | AAGACACACTGATGATTTCCCGAACCCCCGAAGTCACATGCGTGGTCGT |
| | | | GTCTGTGAGTCACGAGGACCCTGAAGTCAAGTTCAACTGGTACGTGGAT |
| | | | GGCGTCGAGGTGCATAATGCCAAGACTAAACCTAGGGAGGAACAGTAC |
| | | | AACTCAACCTATCGCGTCGTGAGCGTCCTGACAGTGCTGCACCAGGATT |
| | | | GGCTGAACGGCAAAGAATATAAGTGCAAAGTGAGCAATAAGGCCCTGC |
| | | | CCGCTCCTATCGAGAAAACCATTTCCAAGGCTAAAGGGCAGCCTCGCG |
| | | | AACCTCAGGTGTACGTGTATCCACCCTCCCGCGATGAGCTGACAAAGAA |
| | | | CCAGGTGTCTCTGACCTGTCTGGTGAAGGGCTTTTACCCTAGCGACATC |
| | | | GCCGTGGAGTGGGAGTCCAATGGCCAGCCAGAGAACAATTATAAGACC |
| | | | ACACCTCCAGTGCTGGACTCTGATGGCAGCTTCGCCCTGGTGTCTAAGC |
| | | | TGACAGTGGACAAGAGCAGATGGCAGCAGGGCAACGTGTTTTCTTGTA |
| | | | GCGTGATGCACGAGGCCCTGCACAATCACTACACCCAGAAGTCCCTGA |
| | | | GCTTAAGCCCTGGAGGCAGCGCCGATGGAGGAATCTGGGAGCTGAAGA |
| | | | AGGACGTGTACGTGGTGGAGCTGGACTGGTATCCAGATGCACCAGGAG |
| | | | AGATGGTGGTGCTGACCTGCGACACACCAGAGGAGGATGGCATCACCT |
| | | | GGACACTGGATCAGAGCTCCGAGGTGCTGGGCTCCGGCAAGACCCTGA |
| | | | CAATCCAGGTGAAGGAGTTCGGCGACGCCGGACAGTACACCTGTCACA |
| | | | AGGGCGGCGAGGTGCTGTCCCACTCTCTGCTGCTGCTGCACAAGAAGG |
| | | | AGGACGGCATCTGGAGCACAGACATCCTGAAGGATCAGAAGGAGCCCA |
| | | | AGAACAAGACCTTCCTGAGGTGCGAGGCCAAGAATTATAGCGGCAGAT |
| | | | TCACCTGTTGGTGGCTGACCACAATCTCCACCGATCTGACATTTTCTGTG |
| | | | AAGTCTAGCAGGGGCTCCTCTGACCCTCAGGGAGTGACATGCGGAGCC |
| | | | GCCACCCTGAGCGCCGAGCGGGTGAGAGGCGATAACAAGGAGTACGAG |
| | | | TATTCCGTGGAGTGCCAGGAGGACTCTGCCTGTCCCGCCGCCGAGGAGT |
| | | | CCCTGCCTATCGAAGTGATGGTGGATGCCGTGCACAAGCTGAAGTACG |
| | | | AGAATTATACAAGCTCCTTCTTTATCAGGGACATCATCAAGCCCGATCC |
| | | | CCCTAAGAACCTGCAGCTGAAGCCTCTGAAGAATAGCCGCCAGGTGGA |
| | | | GGTGTCCTGGGAGTACCCTGACACCTGGAGCACACCACACTCCTATTTC |
| | | | TCTCTGACCTTTTGCGTGCAGGTGCAGGGCAGCGAGAAGGACCGCGTGT |
| | | | TCACCGATAAGACAAGCGCCACCGTGATCTGTCGGAAGAACGCCAGCA |
| | | | TCTCCGTGCGGGCCCAGGATAGATACTATTCTAGCTCCTGGAGCGAGTG |
| | | | GGCCTCCGTGCCATGTTCTGGAGGAGGAGGCAGCGGCGGAGGAGGCTC |
| | | | CGGCGGCGGCGGCTCTAATCTGCCAGTGGCCACCCCTGACCCAGGCATG |
| | | | TTCCCCTGCCTGCACCACTCTCAGAACCTGCTGCGGGCCGTGAGCAATA |
| | | | TGCTGCAGAAGGCCAGACAGACACTGGAGTTTTACCCATGTACCTCCGA |
| | | | GGAGATCGACCACGAGGATATCACAAAGGATAAGACCTCTACAGTGGA |
| | | | GGCATGCCTGCCACTGGAGCTGACCAAGAACGAGAGCTGTCTGAACAG |
| | | | CCGGGAGACATCTTTCATCACCAACGGCAGCTGCCTGGCCTCCAGAAAG |
| | | | ACATCTTTTATGATGGCCCTGTGCCTGTCTAGCATCTACGAGGACCTGA |
| | | | AGATGTATCAGGTGGAGTTCAAGACCATGAACGCCAAGCTGCTGATGG |
| | | | ACCCTAAGAGGCAGATCTTTCTGGATCAGAATATGCTGGCCGTGATCGA |
| | | | CGAGCTGATGCAGGCCCTGAACTTCAATAGCGAGACAGTGCCACAGAA |
| | | | GTCCTCTCTGGAGGAGCCCGATTTCTACAAGACCAAGATCAAGCTGTGC |
| | | | ATCCTGCTGCACGCCTTCCGGATCAGAGCCGTGACCATCGACCGCGTGA |
| | | | TGAGCTACCTGAACGCCAGC |
| 151 | 22672 | Full nt | GAGCCAAAGAGCTCCGACAAGACCCACACATGCCCCCCTTGTCCGGCG |
| | | | CCAGAGGCAGCAGGAGGACCAAGCGTGTTCCTGTTTCCACCCAAGCCC |
| | | | AAAGACACCCTGATGATTAGCCGAACCCCTGAAGTCACATGCGTGGTC |
| | | | GTGTCCGTGTCTCACGAGGACCCAGAAGTCAAGTTCAACTGGTACGTGG |
| | | | ATGGCGTCGAGGTGCATAATGCCAAGACAAAACCCCGGGAGGAACAGT |
| | | | ACAACAGCACCTATAGAGTCGTGTCCGTCCTGACAGTGCTGCACCAGGA |
| | | | TTGGCTGAACGGCAAGGAATATAAGTGCAAAGTGTCCAATAAGGCCCT |
| | | | GCCCGCTCCTATCGAGAAAACCATTTCTAAGGCAAAAGGCCAGCCTCGC |
| | | | GAGCCTCAGGTGTACGTGCTGCCACCTTCCCGCGACGAGCTGACCAAGA |
| | | | ATCAGGTGTCTCTGCTGTGCCTGGTGAAGGGCTTCTATCCAAGCGATAT |
| | | | CGCAGTGGAGTGGGAGTCCAACGGACAGCCCGAGAACAATTACCTGAC |
| | | | CTGGCCACCCGTGCTGGACAGCGATGGCTCCTTCTTTCTGTATTCCAAG |
| | | | CTGACAGTGGACAAGTCTAGATGGCAGCAGGGCAACGTGTTCAGCTGT |
| | | | TCCGTGATGCACGAGGCCCTGCACAACCACTACACCCAGAAGTCTCTGA |
| | | | GCTTAAGCCCAGGAGGAGGAGGAGGCTCTATGAGCGGCAGGAGCGCCA |
| | | | ATGCCGGAGGAGGAGGCAGCGGAGGAGGAGGCTCCGGAGGCGGCGGC |
| | | | TCTGGCGGCGGCGGCAGCAAGATCGACGCCTGCAAGCGCGGCGATGTG |
| | | | ACAGTGAAGCCTAGCCACGTGATCCTGCTGGGCTCCACCGTGAATATCA |
| | | | CATGCTCTCTGAAGCCACGGCAGGGCTGTTTCCACTACTCCCGGAGAAA |
| | | | CAAGCTGATCCTGTATAAGTTCGACAGGCGCATCAACTTTCACCACGGC |
| | | | CACTCTCTGAATAGCCAGGTGACCGGACTGCCACTGGGCACCACACTGT |
| | | | TCGTGTGCAAGCTGGCCTGTATCAATAGCGATGAGATCCAGATCTGTGG |
| | | | AGCCGAGATCTTTGTGGGAGTGGCCCCCGAGCAGCCTCAGAACCTGTCC |
| | | | TGCATCCAGAAGGGAGAGCAGGGAACCGTGGCATGTACATGGGAGCGG |
| | | | GGCAGAGACACCCACCTGTACACCGAGTATACACTGCAGCTGAGCGGC |
| | | | CCCAAGAACCTGACATGGCAGAAGCAGTGCAAGGATATCTACTGTGAC |
| | | | TATCTGGATTTCGGCATCAACCTGACCCCAGAGTCCCCCGAGTCTAACT |
| | | | TCACCGCCAAGGTGACAGCCGTGAACTCTCTGGGCAGCTCCTCTAGCCT |
| | | | GCCCAGCACCTTCACATTTCTGGACATCGTGCGCCCTCTGCCTCCATGG |
| | | | GATATCCGGATCAAGTTTCAGAAGGCCTCCGTGTCTAGATGCACACTGT |
| | | | ACTGGAGGGACGAGGGCCTGGTGCTGCTGAACAGGCTGCGCTATAGAC |
| | | | CCAGCAATTCCAGACTGTGGAACATGGTGAATGTGACCAAGGCCAAGG |
| | | | GCAGGCACGACCTGCTGGATCTGAAGCCTTTCACAGAGTACGAGTTTCA |
| | | | GATCTCCTCTAAGCTGCACCTGTATAAGGGCTCTTGGAGCGATTGGTCC |
| | | | GAGTCTCTGAGGGCACAGACCCCTGAGGAGGAGCCA |
| 152 | 22735 | Full nt | GAGCCAAAGAGCTCCGACAAGACCCACACATGCCCCCCTTGTCCGGCG |
| | | | CCAGAGGCAGCAGGAGGACCAAGCGTGTTCCTGTTTCCACCCAAGCCC |
| | | | AAAGACACCCTGATGATTAGCCGAACCCCTGAAGTCACATGCGTGGTC |
| | | | GTGTCCGTGTCTCACGAGGACCCAGAAGTCAAGTTCAACTGGTACGTGG |
| | | | ATGGCGTCGAGGTGCATAATGCCAAGACAAAACCCCGGGAGGAACAGT |
| | | | ACAACAGCACCTATAGAGTCGTGTCCGTCCTGACAGTGCTGCACCAGGA |
| | | | TTGGCTGAACGGCAAGGAATATAAGTGCAAAGTGTCCAATAAGGCCCT |
| | | | GCCCGCTCCTATCGAGAAAACCATTTCTAAGGCAAAAGGCCAGCCTCGC |
| | | | GAGCCTCAGGTGTACGTGCTGCCACCTTCCCGCGACGAGCTGACCAAGA |
| | | | ATCAGGTGTCTCTGCTGTGCCTGGTGAAGGGCTTCTATCCAAGCGATAT |
| | | | CGCAGTGGAGTGGGAGTCCAACGGACAGCCCGAGAACAATTACCTGAC |
| | | | CTGGCCACCCGTGCTGGACAGCGATGGCTCCTTCTTTCTGTATTCCAAG |
| | | | CTGACAGTGGACAAGTCTAGATGGCAGCAGGGCAACGTGTTCAGCTGT |
| | | | TCCGTGATGCACGAGGCCCTGCACAACCACTACACCCAGAAGTCTCTGA |
| | | | GCTTAAGCCCTGGAGGAGGAGGAGGCTCTGGAGGAGGAGGCTCCATGA |
| | | | GCGGGCGGAGCGCCAACGCAGGGGGCGGCGGCTCTGGCGGCGGCGGC |
| | | | AGCCAGGTGCAGCTGGTGGAGAGCGGCGGCGGCGTGGTGCAGCCCGGC |
| | | | AGAAGCCTGCGGCTGAGCTGCGCAGCCTCTGGCTTCACCTTTAGCTCCT |
| | | | ACGGCATGCACTGGGTGCGGCAGGCCCCTGGCAAGGGACTGGAGTGGG |
| | | | TGGCCTTCATCAGATATGACGGCTCCAATAAGTACTATGCCGATTCTGT |
| | | | GAAGGGCAGGTTTACCATCAGCCGCGACAACTCCAAGAATACACTGTA |
| | | | CCTGCAGATGAACTCCCTGAGGGCCGAGGACACCGCCGTGTACTATTGC |
| | | | AAGACACACGGCTCTCACGATAATTGGGGCCAGGGCACCATGGTGACA |
| | | | GTGTCTTCCGGAGGAGGAGGCAGCATGAGCGGGCGGAGCGCCAACGCA |
| | | | GGGGGTGGAGGCTCCGGAGGAGGAGGCTCTCAGAGCGTGCTGACCCAG |
| | | | CCACCTTCCGTGTCTGGAGCCCCCGGACAGAGGGTGACAATCAGCTGTT |
| | | | CCGGCTCTCGCAGCAACATCGGCAGCAATACCGTGAAGTGGTATCAGC |
| | | | AGCTGCCAGGCACAGCCCCCAAGCTGCTGATCTACTATAATGACCAGCG |
| | | | GCCTTCCGGCGTGCCAGATAGATTCTCCGGCTCTAAGAGCGGCACCTCC |
| | | | GCCTCTCTGGCCATCACAGGCCTGCAGGCAGAGGACGAGGCAGATTAC |
| | | | TATTGTCAGTCCTACGATAGATATACCCACCCCGCCCTGCTGTTTGGCA |
| | | | CCGGCACAAAGGTGACAGTGCTG |
| 153 | 23360 | Full nt | GAGCCAAAGAGCTCCGACAAGACCCACACATGCCCCCCTTGTCCGGCG |
| | | | CCAGAGGCAGCAGGAGGACCAAGCGTGTTCCTGTTTCCACCCAAGCCC |
| | | | AAAGACACCCTGATGATTAGCCGAACCCCTGAAGTCACATGCGTGGTC |
| | | | GTGTCCGTGTCTCACGAGGACCCAGAAGTCAAGTTCAACTGGTACGTGG |
| | | | ATGGCGTCGAGGTGCATAATGCCAAGACAAAACCCCGGGAGGAACAGT |
| | | | ACAACAGCACCTATAGAGTCGTGTCCGTCCTGACAGTGCTGCACCAGGA |
| | | | TTGGCTGAACGGCAAGGAATATAAGTGCAAAGTGTCCAATAAGGCCCT |
| | | | GCCCGCTCCTATCGAGAAAACCATTTCTAAGGCAAAAGGCCAGCCTCGC |
| | | | GAGCCTCAGGTGTACGTGCTGCCACCTTCCCGCGACGAGCTGACCAAGA |
| | | | ATCAGGTGTCTCTGCTGTGCCTGGTGAAGGGCTTCTATCCAAGCGATAT |
| | | | CGCAGTGGAGTGGGAGTCCAACGGACAGCCCGAGAACAATTACCTGAC |
| | | | CTGGCCACCCGTGCTGGACAGCGATGGCTCCTTCTTTCTGTATTCCAAG |
| | | | CTGACAGTGGACAAGTCTAGATGGCAGCAGGGCAACGTGTTCAGCTGT |
| | | | TCCGTGATGCACGAGGCCCTGCACAACCACTACACCCAGAAGTCTCTGA |
| | | | GCTTAAGCCCAGGAGGAGGAGGAGGCTCCGGCGGAGGAGGCTCCATGA |
| | | | GCGGGCGGAGCGCCAACGCAGGGGGCGGCGGCTCTGGCGGCGGCGGC |
| | | | AGCCAGTCCGTGCTGACCCAGCCACCTTCTGTGAGCGGAGCCCCCGGAC |
| | | | AGAGGGTGACAATCTCCTGCTCTGGCAGCCGCTCCAACATCGGCTCTAA |
| | | | TACCGTGAAGTGGTATCAGCAGCTGCCAGGCACAGCCCCCAAGCTGCT |
| | | | GATCTACTATAATGACCAGCGGCCTAGCGGCGTGCCAGATAGATTCTCT |
| | | | GGCAGCAAGTCCGGCACCTCTGCCAGCCTGGCCATCACAGGCCTGCAG |
| | | | GCAGAGGACGAGGCAGATTACTATTGCCAGTCCTACGACCGCTATACCC |
| | | | ACCCTGCCCTGCTGTTTGGCACCGGCACAAAGGTGACAGTGCTGGGCGG |
| | | | CTCCGGCGGCGGCTCTGGAGGAGGCAGCGGCGGCGGCTCCGGAGGAGG |
| | | | CTCTGGCCAGGTGCAGCTGGTGGAGAGCGGAGGAGGAGTGGTGCAGCC |
| | | | CGGCAGAAGCCTGCGGCTGAGCTGTGCAGCCTCTGGCTTCACCTTTAGC |
| | | | TCCTACGGCATGCACTGGGTGCGGCAGGCCCCTGGCAAGGGACTGGAG |
| | | | TGGGTGGCCTTCATCAGATATGACGGCTCTAACAAGTACTATGCCGATA |
| | | | GCGTGAAGGGCAGGTTTACCATCAGCCGCGATAACTCCAAGAATACAC |
| | | | TGTATCTGCAGATGAACAGCCTGCGGGCAGAGGACACCGCCGTGTACT |
| | | | ATTGTAAGACACACGGCTCCCACGATAATTGGGGCCAGGGCACCATGG |
| | | | TGACAGTGTCTAGC |
| 154 | 23361 | Full nt | GAGCCAAAGAGCTCCGACAAGACCCACACATGCCCCCCTTGTCCGGCG |
| | | | CCAGAGGCAGCAGGAGGACCAAGCGTGTTCCTGTTTCCACCCAAGCCC |
| | | | AAAGACACCCTGATGATTAGCCGAACCCCTGAAGTCACATGCGTGGTC |
| | | | GTGTCCGTGTCTCACGAGGACCCAGAAGTCAAGTTCAACTGGTACGTGG |
| | | | ATGGCGTCGAGGTGCATAATGCCAAGACAAAACCCCGGGAGGAACAGT |
| | | | ACAACAGCACCTATAGAGTCGTGTCCGTCCTGACAGTGCTGCACCAGGA |
| | | | TTGGCTGAACGGCAAGGAATATAAGTGCAAAGTGTCCAATAAGGCCCT |
| | | | GCCCGCTCCTATCGAGAAAACCATTTCTAAGGCAAAAGGCCAGCCTCGC |
| | | | GAGCCTCAGGTGTACGTGCTGCCACCTTCCCGCGACGAGCTGACCAAGA |
| | | | ATCAGGTGTCTCTGCTGTGCCTGGTGAAGGGCTTCTATCCAAGCGATAT |
| | | | CGCAGTGGAGTGGGAGTCCAACGGACAGCCCGAGAACAATTACCTGAC |
| | | | CTGGCCACCCGTGCTGGACAGCGATGGCTCCTTCTTTCTGTATTCCAAG |
| | | | CTGACAGTGGACAAGTCTAGATGGCAGCAGGGCAACGTGTTCAGCTGT |
| | | | TCCGTGATGCACGAGGCCCTGCACAACCACTACACCCAGAAGTCTCTGA |
| | | | GCTTAAGCCCAGGAGGAGGAGGAGGCTCCGGCGGAGGAGGCTCCATGA |
| | | | GCGGGCGGAGCGCCAACGCAGGGGGCGGCGGCTCTGGCGGCGGCGGC |
| | | | AGCCAGTCCGTGCTGACCCAGCCACCTTCTGTGAGCGGAGCCCCCGGAC |
| | | | AGAGGGTGACAATCTCCTGCTCTGGCAGCCGCTCCAACATCGGCTCTAA |
| | | | TACCGTGAAGTGGTATCAGCAGCTGCCAGGCACAGCCCCCAAGCTGCT |
| | | | GATCTACTATAATGACCAGCGGCCTAGCGGCGTGCCAGATAGATTCTCT |
| | | | GGCAGCAAGTCCGGCACCTCTGCCAGCCTGGCCATCACAGGCCTGCAG |
| | | | GCAGAGGACGAGGCAGATTACTATTGCCAGTCCTACGACCGCTATACCC |
| | | | ACCCTGCCCTGCTGTTTGGCTGCGGCACAAAGGTGACAGTGCTGGGCGG |
| | | | CTCCGGCGGCGGCTCTGGAGGAGGCAGCGGCGGCGGCTCCGGAGGAGG |
| | | | CTCTGGCCAGGTGCAGCTGGTGGAGAGCGGAGGAGGAGTGGTGCAGCC |
| | | | CGGCAGAAGCCTGCGGCTGAGCTGTGCAGCCTCTGGCTTCACCTTTAGC |
| | | | TCCTACGGCATGCACTGGGTGCGGCAGGCCCCTGGCAAGTGCCTGGAGT |
| | | | GGGTGGCCTTCATCAGATATGACGGCTCTAACAAGTACTATGCCGATAG |
| | | | CGTGAAGGGCAGGTTTACCATCAGCCGCGATAACTCCAAGAATACACT |
| | | | GTATCTGCAGATGAACAGCCTGCGGGCAGAGGACACCGCCGTGTACTA |
| | | | TTGTAAGACACACGGCTCCCACGATAATTGGGGCCAGGGCACCATGGT |
| | | | GACAGTGTCTAGC |
| 155 | 23363 | Full nt | GAGCCAAAGAGCTCCGACAAGACCCACACATGCCCCCCTTGTCCGGCG |
| | | | CCAGAGGCAGCAGGAGGACCAAGCGTGTTCCTGTTTCCACCCAAGCCC |
| | | | AAAGACACCCTGATGATTAGCCGAACCCCTGAAGTCACATGCGTGGTC |
| | | | GTGTCCGTGTCTCACGAGGACCCAGAAGTCAAGTTCAACTGGTACGTGG |
| | | | ATGGCGTCGAGGTGCATAATGCCAAGACAAAACCCCGGGAGGAACAGT |
| | | | ACAACAGCACCTATAGAGTCGTGTCCGTCCTGACAGTGCTGCACCAGGA |
| | | | TTGGCTGAACGGCAAGGAATATAAGTGCAAAGTGTCCAATAAGGCCCT |
| | | | GCCCGCTCCTATCGAGAAAACCATTTCTAAGGCAAAAGGCCAGCCTCGC |
| | | | GAGCCTCAGGTGTACGTGCTGCCACCTTCCCGCGACGAGCTGACCAAGA |
| | | | ATCAGGTGTCTCTGCTGTGCCTGGTGAAGGGCTTCTATCCAAGCGATAT |
| | | | CGCAGTGGAGTGGGAGTCCAACGGACAGCCCGAGAACAATTACCTGAC |
| | | | CTGGCCACCCGTGCTGGACAGCGATGGCTCCTTCTTTCTGTATTCCAAG |
| | | | CTGACAGTGGACAAGTCTAGATGGCAGCAGGGCAACGTGTTCAGCTGT |
| | | | TCCGTGATGCACGAGGCCCTGCACAACCACTACACCCAGAAGTCTCTGA |
| | | | GCTTAAGCCCTGGAGGAGGAGGAGGCTCCGGCGGAGGAGGCTCCATGA |
| | | | GCGGGCGGAGCGCCAACGCAGGGGGCGGCGGCTCCGGCGGCGGCGGCT |
| | | | CTCAGGTGCAGCTGGTGGAGAGCGGAGGAGGAGTGGTGCAGCCCGGCA |
| | | | GAAGCCTGCGGCTGAGCTGCGCAGCCTCTGGCTTCACCTTTAGCTCCTA |
| | | | CGGCATGCACTGGGTGCGGCAGGCCCCTGGCAAGGGACTGGAGTGGGT |
| | | | GGCCTTCATCAGATATGACGGCAGCAATAAGTACTATGCCGATTCCGTG |
| | | | AAGGGCAGGTTTACCATCAGCCGCGACAACTCCAAGAATACACTGTAC |
| | | | CTGCAGATGAACAGCCTGAGGGCCGAGGACACCGCCGTGTACTATTGT |
| | | | AAGACACACGGCTCCCACGATAATTGGGGCCAGGGCACCATGGTGACA |
| | | | GTGTCTAGCGGCGGCTCTGGCGGCGGCAGCATGAGCGGGCGGAGCGCC |
| | | | AACGCAGGGGGTGGCTCTGGAGGAGGCAGCGGAGGAGGCTCCGGCCA |
| | | | GTCTGTGCTGACCCAGCCACCTTCTGTGAGCGGAGCCCCCGGACAGAGG |
| | | | GTGACAATCTCCTGCTCTGGCAGCCGCTCCAACATCGGCAGCAATACCG |
| | | | TGAAGTGGTATCAGCAGCTGCCAGGCACAGCCCCCAAGCTGCTGATCTA |
| | | | CTATAATGACCAGCGGCCTTCCGGCGTGCCAGATAGATTCTCTGGCAGC |
| | | | AAGTCCGGCACCTCTGCCAGCCTGGCCATCACAGGCCTGCAGGCAGAG |
| | | | GACGAGGCAGATTACTATTGTCAGTCCTACGATAGATATACCCACCCCG |
| | | | CCCTGCTGTTTGGCACCGGCACAAAGGTGACAGTGCTG |
| 156 | 23364 | Full nt | GAGCCAAAGAGCTCCGACAAGACCCACACATGCCCCCCTTGTCCGGCG |
| | | | CCAGAGGCAGCAGGAGGACCAAGCGTGTTCCTGTTTCCACCCAAGCCC |
| | | | AAAGACACCCTGATGATTAGCCGAACCCCTGAAGTCACATGCGTGGTC |
| | | | GTGTCCGTGTCTCACGAGGACCCAGAAGTCAAGTTCAACTGGTACGTGG |
| | | | ATGGCGTCGAGGTGCATAATGCCAAGACAAAACCCCGGGAGGAACAGT |
| | | | ACAACAGCACCTATAGAGTCGTGTCCGTCCTGACAGTGCTGCACCAGGA |
| | | | TTGGCTGAACGGCAAGGAATATAAGTGCAAAGTGTCCAATAAGGCCCT |
| | | | GCCCGCTCCTATCGAGAAAACCATTTCTAAGGCAAAAGGCCAGCCTCGC |
| | | | GAGCCTCAGGTGTACGTGCTGCCACCTTCCCGCGACGAGCTGACCAAGA |
| | | | ATCAGGTGTCTCTGCTGTGCCTGGTGAAGGGCTTCTATCCAAGCGATAT |
| | | | CGCAGTGGAGTGGGAGTCCAACGGACAGCCCGAGAACAATTACCTGAC |
| | | | CTGGCCACCCGTGCTGGACAGCGATGGCTCCTTCTTTCTGTATTCCAAG |
| | | | CTGACAGTGGACAAGTCTAGATGGCAGCAGGGCAACGTGTTCAGCTGT |
| | | | TCCGTGATGCACGAGGCCCTGCACAACCACTACACCCAGAAGTCTCTGA |
| | | | GCTTAAGCCCTGGAGGAGGAGGAGGCTCCGGCGGAGGAGGCTCCATGA |
| | | | GCGGGCGGAGCGCCAACGCAGGGGGCGGCGGCTCCGGCGGCGGCGGCT |
| | | | CTCAGGTGCAGCTGGTGGAGAGCGGAGGAGGAGTGGTGCAGCCCGGCA |
| | | | GAAGCCTGCGGCTGAGCTGCGCAGCCTCTGGCTTCACCTTTAGCTCCGC |
| | | | CGGCATGCACTGGGTGCGGCAGGCCCCTGGCAAGGGACTGGAGTGGGT |
| | | | GGCCTTCATCAGATATGACGGCAGCAATAAGTACTATGCCGATTCCGTG |
| | | | AAGGGCAGGTTTACCATCAGCCGCGACAACTCCAAGAATACACTGTAC |
| | | | CTGCAGATGAACAGCCTGAGGGCCGAGGACACCGCCGTGTACTATTGT |
| | | | AAGACACACGGCTCCCACGATAATTGGGGCCAGGGCACCATGGTGACA |
| | | | GTGTCTAGCGGCGGCTCTGGCGGCGGCAGCATGAGCGGGCGGAGCGCC |
| | | | AACGCAGGGGGTGGCTCTGGAGGAGGCAGCGGAGGAGGCTCCGGCCA |
| | | | GTCTGTGCTGACCCAGCCACCTTCTGTGAGCGGAGCCCCCGGACAGAGG |
| | | | GTGACAATCTCCTGCTCTGGCAGCCGCTCCAACATCGGCAGCAATACCG |
| | | | TGAAGTGGTATCAGCAGCTGCCAGGCACAGCCCCCAAGCTGCTGATCTA |
| | | | CTATAATGACCAGCGGCCTTCCGGCGTGCCAGATAGATTCTCTGGCAGC |
| | | | AAGTCCGGCACCTCTGCCAGCCTGGCCATCACAGGCCTGCAGGCAGAG |
| | | | GACGAGGCAGATTACTATTGTCAGTCCTACGATAGATATACCCACCCCG |
| | | | CCCTGCTGTTTGGCACCGGCACAAAGGTGACAGTGCTG |
| 157 | 23512 | Full nt | GAGCCAAAGAGCTCCGACAAGACCCACACATGCCCCCCTTGTCCGGCG |
| | | | CCAGAGGCAGCAGGAGGACCAAGCGTGTTCCTGTTTCCACCCAAGCCC |
| | | | AAAGACACCCTGATGATTAGCCGAACCCCTGAAGTCACATGCGTGGTC |
| | | | GTGTCCGTGTCTCACGAGGACCCAGAAGTCAAGTTCAACTGGTACGTGG |
| | | | ATGGCGTCGAGGTGCATAATGCCAAGACAAAACCCCGGGAGGAACAGT |
| | | | ACAACAGCACCTATAGAGTCGTGTCCGTCCTGACAGTGCTGCACCAGGA |
| | | | TTGGCTGAACGGCAAGGAATATAAGTGCAAAGTGTCCAATAAGGCCCT |
| | | | GCCCGCTCCTATCGAGAAAACCATTTCTAAGGCAAAAGGCCAGCCTCGC |
| | | | GAGCCTCAGGTGTACGTGCTGCCACCTTCCCGCGACGAGCTGACCAAGA |
| | | | ATCAGGTGTCTCTGCTGTGCCTGGTGAAGGGCTTCTATCCAAGCGATAT |
| | | | CGCAGTGGAGTGGGAGTCCAACGGACAGCCCGAGAACAATTACCTGAC |
| | | | CTGGCCACCCGTGCTGGACAGCGATGGCTCCTTCTTTCTGTATTCCAAG |
| | | | CTGACAGTGGACAAGTCTAGATGGCAGCAGGGCAACGTGTTCAGCTGT |
| | | | TCCGTGATGCACGAGGCCCTGCACAACCACTACACCCAGAAGTCTCTGA |
| | | | GCTTAAGCCCTGGAGGAGGAGGAGGCTCTGGAGGAGGAGGCTCCGGCG |
| | | | GCGGGAGCGGCGGCGGCAGCGGGGGCGGCGGCTCTGGCGGCGGCGGC |
| | | | AGCCAGGTGCAGCTGGTGGAGAGCGGCGGCGGCGTGGTGCAGCCCGGC |
| | | | AGAAGCCTGCGGCTGAGCTGCGCAGCCTCTGGCTTCACCTTTAGCTCCT |
| | | | ACGGCATGCACTGGGTGCGGCAGGCCCCTGGCAAGGGACTGGAGTGGG |
| | | | TGGCCTTCATCAGATATGACGGCTCCAATAAGTACTATGCCGATTCTGT |
| | | | GAAGGGCAGGTTTACCATCAGCCGCGACAACTCCAAGAATACACTGTA |
| | | | CCTGCAGATGAACTCCCTGAGGGCCGAGGACACCGCCGTGTACTATTGC |
| | | | AAGACACACGGCTCTCACGATAATTGGGGCCAGGGCACCATGGTGACA |
| | | | GTGTCTTCCGGAGGAGGAGGCAGCGGCGGCGGGAGCGGCGGCGGCAGC |
| | | | GGGGGTGGAGGCTCCGGAGGAGGAGGCTCTCAGAGCGTGCTGACCCAG |
| | | | CCACCTTCCGTGTCTGGAGCCCCCGGACAGAGGGTGACAATCAGCTGTT |
| | | | CCGGCTCTCGCAGCAACATCGGCAGCAATACCGTGAAGTGGTATCAGC |
| | | | AGCTGCCAGGCACAGCCCCCAAGCTGCTGATCTACTATAATGACCAGCG |
| | | | GCCTTCCGGCGTGCCAGATAGATTCTCCGGCTCTAAGAGCGGCACCTCC |
| | | | GCCTCTCTGGCCATCACAGGCCTGCAGGCAGAGGACGAGGCAGATTAC |
| | | | TATTGTCAGTCCTACGATAGATATACCCACCCCGCCCTGCTGTTTGGCA |
| | | | CCGGCACAAAGGTGACAGTGCTG |
| 158 | 23513 | Full nt | GAGCCAAAGAGCTCCGACAAGACCCACACATGCCCCCCTTGTCCGGCG |
| | | | CCAGAGGCAGCAGGAGGACCAAGCGTGTTCCTGTTTCCACCCAAGCCC |
| | | | AAAGACACCCTGATGATTAGCCGAACCCCTGAAGTCACATGCGTGGTC |
| | | | GTGTCCGTGTCTCACGAGGACCCAGAAGTCAAGTTCAACTGGTACGTGG |
| | | | ATGGCGTCGAGGTGCATAATGCCAAGACAAAACCCCGGGAGGAACAGT |
| | | | ACAACAGCACCTATAGAGTCGTGTCCGTCCTGACAGTGCTGCACCAGGA |
| | | | TTGGCTGAACGGCAAGGAATATAAGTGCAAAGTGTCCAATAAGGCCCT |
| | | | GCCCGCTCCTATCGAGAAAACCATTTCTAAGGCAAAAGGCCAGCCTCGC |
| | | | GAGCCTCAGGTGTACGTGCTGCCACCTTCCCGCGACGAGCTGACCAAGA |
| | | | ATCAGGTGTCTCTGCTGTGCCTGGTGAAGGGCTTCTATCCAAGCGATAT |
| | | | CGCAGTGGAGTGGGAGTCCAACGGACAGCCCGAGAACAATTACCTGAC |
| | | | CTGGCCACCCGTGCTGGACAGCGATGGCTCCTTCTTTCTGTATTCCAAG |
| | | | CTGACAGTGGACAAGTCTAGATGGCAGCAGGGCAACGTGTTCAGCTGT |
| | | | TCCGTGATGCACGAGGCCCTGCACAACCACTACACCCAGAAGTCTCTGA |
| | | | GCTTAAGCCCAGGAGGAGGAGGAGGCTCTGGCGGCGGCAGCGGCGGCG |
| | | | GCAGCGGAGGAGGAGGCAGCGGAGGAGGAGGCTCCGGAGGCGGCGGC |
| | | | TCTGGCGGCGGCGGCAGCAAGATCGACGCCTGCAAGCGCGGCGATGTG |
| | | | ACAGTGAAGCCTAGCCACGTGATCCTGCTGGGCTCCACCGTGAATATCA |
| | | | CATGCTCTCTGAAGCCACGGCAGGGCTGTTTCCACTACTCCCGGAGAAA |
| | | | CAAGCTGATCCTGTATAAGTTCGACAGGCGCATCAACTTTCACCACGGC |
| | | | CACTCTCTGAATAGCCAGGTGACCGGACTGCCACTGGGCACCACACTGT |
| | | | TCGTGTGCAAGCTGGCCTGTATCAATAGCGATGAGATCCAGATCTGTGG |
| | | | AGCCGAGATCTTTGTGGGAGTGGCCCCCGAGCAGCCTCAGAACCTGTCC |
| | | | TGCATCCAGAAGGGAGAGCAGGGAACCGTGGCATGTACATGGGAGCGG |
| | | | GGCAGAGACACCCACCTGTACACCGAGTATACACTGCAGCTGAGCGGC |
| | | | CCCAAGAACCTGACATGGCAGAAGCAGTGCAAGGATATCTACTGTGAC |
| | | | TATCTGGATTTCGGCATCAACCTGACCCCAGAGTCCCCCGAGTCTAACT |
| | | | TCACCGCCAAGGTGACAGCCGTGAACTCTCTGGGCAGCTCCTCTAGCCT |
| | | | GCCCAGCACCTTCACATTTCTGGACATCGTGCGCCCTCTGCCTCCATGG |
| | | | GATATCCGGATCAAGTTTCAGAAGGCCTCCGTGTCTAGATGCACACTGT |
| | | | ACTGGAGGGACGAGGGCCTGGTGCTGCTGAACAGGCTGCGCTATAGAC |
| | | | CCAGCAATTCCAGACTGTGGAACATGGTGAATGTGACCAAGGCCAAGG |
| | | | GCAGGCACGACCTGCTGGATCTGAAGCCTTTCACAGAGTACGAGTTTCA |
| | | | GATCTCCTCTAAGCTGCACCTGTATAAGGGCTCTTGGAGCGATTGGTCC |
| | | | GAGTCTCTGAGGGCACAGACCCCTGAGGAGGAGCCA |
| 159 | 23710 | Full nt | GAGCCAAAGAGCTCCGACAAGACCCACACATGCCCCCCTTGTCCGGCG |
| | | | CCAGAGGCTGCAGGAGGACCAAGCGTGTTCCTGTTTCCACCCAAGCCTA |
| | | | AAGACACACTGATGATTTCCCGAACCCCCGAAGTCACATGCGTGGTCGT |
| | | | GTCTGTGAGTCACGAGGACCCTGAAGTCAAGTTCAACTGGTACGTGGAT |
| | | | GGCGTCGAGGTGCATAATGCCAAGACTAAACCTAGGGAGGAACAGTAC |
| | | | AACTCAACCTATCGCGTCGTGAGCGTCCTGACAGTGCTGCACCAGGATT |
| | | | GGCTGAACGGCAAAGAATATAAGTGCAAAGTGAGCAATAAGGCCCTGC |
| | | | CCGCTCCTATCGAGAAAACCATTTCCAAGGCTAAAGGGCAGCCTCGCG |
| | | | AACCACAGGTGTACGTGTATCCCCCTTCCCGGGACGAGCTGACCAAGA |
| | | | ACCAGGTGTCTCTGACATGCCTGGTGAAGGGCTTCTACCCCAGCGATAT |
| | | | CGCCGTGGAGTGGGAGTCCAATGGCCAGCCTGAGAACAATTATAAGAC |
| | | | CACACCACCCGTGCTGGACAGCGATGGCTCCTTCGCCCTGGTGTCCAAG |
| | | | CTGACCGTGGACAAGTCTAGGTGGCAGCAGGGCAACGTGTTTTCTTGCA |
| | | | GCGTGATGCACGAGGCCCTGCACAATCACTACACCCAGAAGTCCCTGA |
| | | | GCTTAAGCCCAGGAGGCTCCGCCGACGGAGGAATGAGCGGGCGGAGCG |
| | | | CCAACGCCGGGAGCGCAGACGGCGGCATCTGGGAGCTGAAGAAGGAC |
| | | | GTGTACGTGGTGGAGCTGGACTGGTACCCGGATGCACCAGGAGAGATG |
| | | | GTGGTGCTGACCTGCGACACACCTGAGGAGGATGGCATCACCTGGACA |
| | | | CTGGACCAGAGCTCCGAGGTGCTGGGCAGCGGCAAGACCCTGACAATC |
| | | | CAGGTGAAGGAGTTCGGCGATGCCGGACAGTACACATGTCACAAGGGC |
| | | | GGCGAGGTGCTGTCTCACAGCCTGCTGCTGCTGCACAAGAAGGAGGAT |
| | | | GGCATCTGGTCTACAGACATCCTGAAGGATCAGAAGGAGCCTAAGAAC |
| | | | AAGACCTTCCTGAGGTGCGAGGCCAAGAATTATAGCGGCAGATTCACC |
| | | | TGTTGGTGGCTGACCACAATCTCCACCGACCTGACATTTTCTGTGAAGT |
| | | | CTAGCCGGGGCTCCTCTGATCCACAGGGAGTGACATGCGGAGCCGCCA |
| | | | CCCTGTCCGCCGAGCGGGTGAGAGGCGACAACAAGGAGTACGAGTATT |
| | | | CTGTGGAGTGCCAGGAGGATAGCGCCTGTCCCGCCGCCGAGGAGTCTCT |
| | | | GCCTATCGAAGTGATGGTGGACGCCGTGCACAAGCTGAAGTACGAGAA |
| | | | TTATACAAGCTCCTTCTTTATCCGGGACATCATCAAGCCAGATCCCCCT |
| | | | AAGAACCTGCAGCTGAAGCCCCTGAAGAATAGCAGACAGGTGGAGGTG |
| | | | TCCTGGGAGTACCCTGATACCTGGTCCACACCACACTCTTATTTCAGCCT |
| | | | GACCTTTTGCGTGCAGGTGCAGGGCAAGAGCAAGAGGGAGAAGAAGG |
| | | | ACCGCGTGTTCACCGATAAGACATCCGCCACCGTGATCTGTCGGAAGAA |
| | | | CGCCAGCATCTCTGTGAGAGCCCAGGACCGGTACTATTCTAGCTCCTGG |
| | | | AGCGAGTGGGCCTCCGTGCCTTGTTCTGGAGGAGGAGGCAGCGGCGGA |
| | | | GGAGGCTCCGGAGGAGGAGGCTCTAATCTGCCAGTGGCCACCCCAGAC |
| | | | CCCGGAATGTTCCCATGCCTGCACCACTCCCAGAACCTGCTGCGGGCCG |
| | | | TGTCTAATATGCTGCAGAAGGCCAGACAGACACTGGAGTTTTACCCTTG |
| | | | TACCTCTGAGGAGATCGACCACGAGGATATCACAAAGGATAAGACCAG |
| | | | CACAGTGGAGGCCTGCCTGCCACTGGAGCTGACCAAGAACGAGAGCTG |
| | | | TCTGAACAGCCGGGAGACCAGCTTCATCACCAACGGCAGCTGCCTGGC |
| | | | CTCCAGAAAGACATCTTTTATGATGGCCCTGTGCCTGAGCAGCATCTAC |
| | | | GAGGACCTGAAGATGTATCAGGTGGAGTTCAAGACCATGAACGCCAAG |
| | | | CTGCTGATGGACCCCAAGCGGCAGATCTTTCTGGATCAGAATATGCTGG |
| | | | CCGTGATCGACGAGCTGATGCAGGCCCTGAACTTTAATAGCGAGACAG |
| | | | TGCCTCAGAAGTCCTCTCTGGAGGAGCCAGATTTCTACAAGACCAAGAT |
| | | | CAAGCTGTGCATCCTGCTGCACGCCTTCCGGATCAGAGCCGTGACCATC |
| | | | GACAGAGTGATGAGCTACCTGAACGCCAGC |
| 160 | 23711 | Full nt | GAGCCAAAGAGCTCCGACAAGACCCACACATGCCCCCCTTGTCCGGCG |
| | | | CCAGAGGCTGCAGGAGGACCAAGCGTGTTCCTGTTTCCACCCAAGCCTA |
| | | | AAGACACACTGATGATTTCCCGAACCCCCGAAGTCACATGCGTGGTCGT |
| | | | GTCTGTGAGTCACGAGGACCCTGAAGTCAAGTTCAACTGGTACGTGGAT |
| | | | GGCGTCGAGGTGCATAATGCCAAGACTAAACCTAGGGAGGAACAGTAC |
| | | | AACTCAACCTATCGCGTCGTGAGCGTCCTGACAGTGCTGCACCAGGATT |
| | | | GGCTGAACGGCAAAGAATATAAGTGCAAAGTGAGCAATAAGGCCCTGC |
| | | | CCGCTCCTATCGAGAAAACCATTTCCAAGGCTAAAGGGCAGCCTCGCG |
| | | | AACCACAGGTGTACGTGTATCCCCCTTCCCGGGACGAGCTGACCAAGA |
| | | | ACCAGGTGTCTCTGACATGCCTGGTGAAGGGCTTCTACCCCAGCGATAT |
| | | | CGCCGTGGAGTGGGAGTCCAATGGCCAGCCTGAGAACAATTATAAGAC |
| | | | CACACCACCCGTGCTGGACAGCGATGGCTCCTTCGCCCTGGTGTCCAAG |
| | | | CTGACCGTGGACAAGTCTAGGTGGCAGCAGGGCAACGTGTTTTCTTGCA |
| | | | GCGTGATGCACGAGGCCCTGCACAATCACTACACCCAGAAGTCCCTGA |
| | | | GCTTAAGCCCCGGCGGCTCTGCCGACGGAGGAATGAGCGGGCGGAGCG |
| | | | CCAACGCCGGGAGCGCAGACGGCGGCATCTGGGAGCTGAAGAAGGAC |
| | | | GTGTACGTGGTGGAGCTGGATTGGTACCCGGATGCCCCAGGCGAGATG |
| | | | GTGGTGCTGACCTGCGACACACCCGAGGAGGATGGCATCACCTGGACA |
| | | | CTGGATCAGAGCTCCGAGGTGCTGGGCTCCGGCAAGACCCTGACAATC |
| | | | CAGGTGAAGGAGTTCGGCGACGCCGGACAGTACACATGTCACAAGGGA |
| | | | GGAGAGGTGCTGAGCCACTCCCTGCTGCTGCTGCACAAGAAGGAGGAC |
| | | | GGCATCTGGTCCACAGACATCCTGAAGGATCAGAAGGAGCCCAAGAAC |
| | | | AAGACCTTCCTGAGGTGCGAGGCCAAGAATTATAGCGGCAGATTCACC |
| | | | TGTTGGTGGCTGACCACAATCTCCACCGATCTGACATTTTCTGTGAAGT |
| | | | CTAGCCGGGGCTCCTCTGACCCTCAGGGAGTGACATGCGGAGCCGCCA |
| | | | CCCTGTCCGCCGAGCGGGTGAGAGGCGATAACAAGGAGTACGAGTATT |
| | | | CTGTGGAGTGCCAGGAGGACAGCGCCTGTCCAGCCGCCGAGGAGAGCC |
| | | | TGCCAATCGAAGTGATGGTGGATGCCGTGCACAAGCTGAAGTACGAGA |
| | | | ATTATACAAGCTCCTTCTTTATCAGGGACATCATCAAGCCCGATCCCCC |
| | | | TAAGAACCTGCAGCTGAAGCCTCTGAAGAATAGCCGCCAGGTGGAGGT |
| | | | GTCCTGGGAGTACCCCGACACCTGGAGCACACCTCACTCCTATTTCTCT |
| | | | CTGACCTTTTGCGTGCAGGTGCAGGGCGAGAGCAAGCAGGAGAAGAAG |
| | | | GACAGGGTGTTCACCGATAAGACATCCGCCACCGTGATCTGTCGCAAG |
| | | | AACGCCTCTATCAGCGTGCGGGCACAGGACCGGTACTATTCTAGCTCCT |
| | | | GGAGCGAGTGGGCCTCCGTGCCTTGTTCTGGAGGAGGAGGCAGCGGCG |
| | | | GAGGAGGCTCCGGAGGAGGAGGCTCTAATCTGCCAGTGGCCACCCCAG |
| | | | ACCCCGGAATGTTCCCATGCCTGCACCACTCCCAGAACCTGCTGCGGGC |
| | | | CGTGTCTAATATGCTGCAGAAGGCCAGACAGACACTGGAGTTTTACCCT |
| | | | TGTACCTCTGAGGAGATCGACCACGAGGATATCACAAAGGATAAGACC |
| | | | AGCACAGTGGAGGCCTGCCTGCCACTGGAGCTGACCAAGAACGAGAGC |
| | | | TGTCTGAACAGCCGGGAGACCAGCTTCATCACCAACGGCAGCTGCCTG |
| | | | GCCTCCAGAAAGACATCTTTTATGATGGCCCTGTGCCTGAGCAGCATCT |
| | | | ACGAGGACCTGAAGATGTATCAGGTGGAGTTCAAGACCATGAACGCCA |
| | | | AGCTGCTGATGGACCCCAAGCGGCAGATCTTTCTGGATCAGAATATGCT |
| | | | GGCCGTGATCGACGAGCTGATGCAGGCCCTGAACTTTAATAGCGAGAC |
| | | | AGTGCCTCAGAAGTCCTCTCTGGAGGAGCCAGATTTCTACAAGACCAAG |
| | | | ATCAAGCTGTGCATCCTGCTGCACGCCTTCCGGATCAGAGCCGTGACCA |
| | | | TCGACAGAGTGATGAGCTACCTGAACGCCAGC |
| 161 | 24228 | Full nt | GAGCCAAAGAGCTCCGACAAGACCCACACATGCCCCCCTTGTCCGGCG |
| | | | CCAGAGGCTGCAGGAGGACCAAGCGTGTTCCTGTTTCCACCCAAGCCTA |
| | | | AAGACACACTGATGATTTCCCGAACCCCCGAAGTCACATGCGTGGTCGT |
| | | | GTCTGTGAGTCACGAGGACCCTGAAGTCAAGTTCAACTGGTACGTGGAT |
| | | | GGCGTCGAGGTGCATAATGCCAAGACTAAACCTAGGGAGGAACAGTAC |
| | | | AACTCAACCTATCGCGTCGTGAGCGTCCTGACAGTGCTGCACCAGGATT |
| | | | GGCTGAACGGCAAAGAATATAAGTGCAAAGTGAGCAATAAGGCCCTGC |
| | | | CCGCTCCTATCGAGAAAACCATTTCCAAGGCTAAAGGGCAGCCTCGCG |
| | | | AACCACAGGTGTACGTGTATCCCCCTTCCCGGGACGAGCTGACCAAGA |
| | | | ACCAGGTGTCTCTGACATGCCTGGTGAAGGGCTTCTACCCCAGCGATAT |
| | | | CGCCGTGGAGTGGGAGTCCAATGGCCAGCCTGAGAACAATTATAAGAC |
| | | | CACACCACCCGTGCTGGACAGCGATGGCTCCTTCGCCCTGGTGTCCAAG |
| | | | CTGACCGTGGACAAGTCTAGGTGGCAGCAGGGCAACGTGTTTTCTTGCA |
| | | | GCGTGATGCACGAGGCCCTGCACAATCACTACACCCAGAAGTCCCTGA |
| | | | GCTTAAGCCCAGGAGGCAGCGCCGATGGAGGAATCTGGGAGCTGAAGA |
| | | | AGGACGTGTACGTGGTGGAGCTGGACTGGTACCCGGATGCCCCAGGCG |
| | | | AGATGGTGGTGCTGACCTGCGACACACCTGAGGAGGATGGCATCACCT |
| | | | GGACACTGGATCAGAGCTCCGAGGTGCTGGGCTCCGGCAAGACCCTGA |
| | | | CAATCCAGGTGAAGGAGTTCGGCGACGCCGGACAGTACACATGTCACA |
| | | | AGGGAGGAGAGGTGCTGAGCCACTCCCTGCTGCTGCTGCACAAGAAGG |
| | | | AGGACGGCATCTGGAGCACAGACATCCTGAAGGATCAGAAGGAGCCAA |
| | | | AGAACAAGACCTTCCTGCGGTGCGAGGCCAAGAATTATAGCGGCAGAT |
| | | | TCACCTGTTGGTGGCTGACCACAATCAGCACCGATCTGACATTTTCCGT |
| | | | GAAGTCTAGCAGGGGCTCCTCTGACCCCCAGGGAGTGACATGCGGAGC |
| | | | CGCCACCCTGAGCGCCGAGCGGGTGAGAGGCGATAACAAGGAGTACGA |
| | | | GTATTCCGTGGAGTGCCAGGAGGACTCTGCCTGTCCAGCCGCCGAGGA |
| | | | GTCCCTGCCAATCGAAGTGATGGTGGATGCCGTGCACAAGCTGAAGTA |
| | | | CGAGAATTATACAAGCTCCTTCTTTATCAGGGACATCATCAAGCCCGAT |
| | | | CCCCCTAAGAACCTGCAGCTGAAGCCCCTGAAGAACAGCAGACAGGTG |
| | | | GAGGTGAGCTGGGAGTACCCCGACACCTGGAGCACACCTCACTCCTATT |
| | | | TCTCTCTGACCTTTTGCGTGCAGGTGCAGGGCAAGTCTAAGAGGGAGAA |
| | | | GAAGGACCGCGTGTTCACCGATAAGACAAGCGCCACCGTGATCTGTAG |
| | | | AAAGAACGCCTCTATCAGCGTGCGGGCACAGGACCGGTACTACAGCTC |
| | | | CTCTTGGAGCGAGTGGGCCTCCGTGCCCTGCTCTGGCGGCGGCGGCTCT |
| | | | GGAGGAGGAGGCAGCGGCGGAGGAGGCTCCAACCTGCCTGTGGCCACC |
| | | | CCCGATCCTGGCATGTTCCCATGCCTGCACCACTCTCAGAACCTGCTGA |
| | | | GGGCCGTGTCCAATATGCTGCAGAAGGCCCGCCAGACACTGGAGTTTTA |
| | | | TCCCTGTACCAGCGAGGAGATCGACCACGAGGATATCACAAAGGACAA |
| | | | GACCTCCACAGTGGAGGCCTGCCTGCCTCTGGAGCTGACCAAGAACGA |
| | | | GAGCTGTCTGAACAGCCGGGAGACCAGCTTCATCACCAATGGCAGCTG |
| | | | CCTGGCCTCCAGAAAGACATCTTTTATGATGGCCCTGTGCCTGAGCTCC |
| | | | ATCTACGAGGATCTGAAGATGTATCAGGTGGAGTTCAAGACCATGAAC |
| | | | GCCAAGCTGCTGATGGACCCTAAGCGGCAGATCTTTCTGGATCAGAATA |
| | | | TGCTGGCCGTGATCGACGAGCTGATGCAGGCCCTGAACTTCAATAGCGA |
| | | | GACAGTGCCCCAGAAGTCTAGCCTGGAGGAGCCTGATTTCTACAAGAC |
| | | | CAAGATCAAGCTGTGCATCCTGCTGCACGCCTTTCGGATCAGAGCCGTG |
| | | | ACCATCGACAGAGTGATGTCTTATCTGAACGCCAGCGGCGGCGGAGGC |
| | | | TCTATGAGCGGGCGGAGCGCCAACGCAGGGGGAGGAGGCTCCGGAGG |
| | | | AGGAGGCTCTGGCGGCGGCGGCAGCGGAGGCGGCGGCTCCGAGATCGT |
| | | | GATGACACAGAGCCCTGCCACCCTGTCCGTGTCTCCAGGAGAGAGGGC |
| | | | CACACTGTCCTGTAGAGCCAGCCAGTCCATCTCTATCAACCTGCACTGG |
| | | | TATCAGCAGAAGCCAGGCCAGGCCCCCAGGCTGCTGATCTATTTCGCCA |
| | | | GCCAGAGCATTTCTGGCATCCCTGCACGCTTCAGCGGCTCCGGCTCTGG |
| | | | CACCGAGTTTACCCTGACAATCTCCTCTCTGCAGAGCGAGGATTTTGCC |
| | | | GTGTACTATTGCCAGCAGAGCAATTCCTTCCCACTGACATTTGGCGGCG |
| | | | GCACCAAGGTGGAGATCAAGGGAGGCAGCGGCGGCGGCTCCGGCGGC |
| | | | GGCTCTGGGGGAGGCAGCGGAGGAGGCTCCGGACAGGTGCAGCTGGTG |
| | | | CAGTCCGGAGCCGAGGTGAAGAAGCCAGGGGCCAGCGTGAAGGTGAG |
| | | | CTGTAAGGCCTCCGGCTACACCTTCACAGACTACTATCTGCACTGGGTG |
| | | | AGGCAGGCCCCCGGACAGGGACTGGAGTGGATGGGCTGGATCGACCCA |
| | | | GAGAACGGCGATACAGAGTACGCCCCCAAGTTTCAGGGCCGCGTGACC |
| | | | ATGACCACAGATACCTCTACAAGCACCGCCTATATGGAGCTGAGGTCCC |
| | | | TGCGCTCTGACGATACCGCCGTGTACTATTGTAACGCCAATAAGGAGCT |
| | | | GAGGTACTTTGACGTGTGGGGCCAGGGCACAATGGTGACCGTGAGCTC |
| | | | C |
| 162 | 24229 | Full nt | GAGCCAAAGAGCTCCGACAAGACCCACACATGCCCCCCTTGTCCGGCG |
| | | | CCAGAGGCAGCAGGAGGACCAAGCGTGTTCCTGTTTCCACCCAAGCCC |
| | | | AAAGACACCCTGATGATTAGCCGAACCCCTGAAGTCACATGCGTGGTC |
| | | | GTGTCCGTGTCTCACGAGGACCCAGAAGTCAAGTTCAACTGGTACGTGG |
| | | | ATGGCGTCGAGGTGCATAATGCCAAGACAAAACCCCGGGAGGAACAGT |
| | | | ACAACAGCACCTATAGAGTCGTGTCCGTCCTGACAGTGCTGCACCAGGA |
| | | | TTGGCTGAACGGCAAGGAATATAAGTGCAAAGTGTCCAATAAGGCCCT |
| | | | GCCCGCTCCTATCGAGAAAACCATTTCTAAGGCAAAAGGCCAGCCTCGC |
| | | | GAGCCTCAGGTGTACGTGCTGCCACCTTCCCGCGACGAGCTGACCAAGA |
| | | | ATCAGGTGTCTCTGCTGTGCCTGGTGAAGGGCTTCTATCCAAGCGATAT |
| | | | CGCAGTGGAGTGGGAGTCCAACGGACAGCCCGAGAACAATTACCTGAC |
| | | | CTGGCCACCCGTGCTGGACAGCGATGGCTCCTTCTTTCTGTATTCCAAG |
| | | | CTGACAGTGGACAAGTCTAGATGGCAGCAGGGCAACGTGTTCAGCTGT |
| | | | TCCGTGATGCACGAGGCCCTGCACAACCACTACACCCAGAAGTCTCTGA |
| | | | GCTTAAGCCCAGGAGGAGGAGGAGGCTCTGGAGGAGGAGGCTCTATGA |
| | | | GCGGGCGGAGCGCCAACGCAGGGGGAGGAGGCAGCGGGGGAGGAGGC |
| | | | TCCCAGGTGCAGCTGGTGGAGAGCGGCGGCGGCGTGGTGCAGCCCGGC |
| | | | AGAAGCCTGCGGCTGAGCTGCGCAGCCTCCGGCTTCACCTTTAGCTCCT |
| | | | ACGGCATGCACTGGGTGCGGCAGGCCCCTGGCAAGGGACTGGAGTGGG |
| | | | TGGCCTTCATCAGATATGACGGCTCCAATAAGTACTATGCCGATTCTGT |
| | | | GAAGGGCCGGTTTACAATCTCTAGAGACAACAGCAAGAATACCCTGTA |
| | | | CCTGCAGATGAACAGCCTGCGGGCCGAGGACACAGCCGTGTACTATTG |
| | | | CAAGACCCACGGCTCCCACGATAATTGGGGCCAGGGCACAATGGTGAC |
| | | | CGTGTCTTCCGGCGGCGGCGGCTCCATGAGCGGGCGGAGCGCCAACGC |
| | | | AGGGGGTGGAGGCTCCGGAGGAGGAGGCAGCCAGTCCGTGCTGACACA |
| | | | GCCACCTTCTGTGAGCGGAGCCCCCGGACAGAGGGTGACCATCTCCTGT |
| | | | TCTGGCAGCCGCTCCAACATCGGCAGCAATACAGTGAAGTGGTATCAG |
| | | | CAGCTGCCAGGCACCGCCCCCAAGCTGCTGATCTACTATAATGACCAGC |
| | | | GGCCTTCCGGCGTGCCAGATAGATTCTCTGGCAGCAAGTCCGGCACATC |
| | | | TGCCAGCCTGGCCATCACCGGCCTGCAGGCAGAGGACGAGGCCGATTA |
| | | | CTATTGCCAGAGCTACGATAGGTATACACACCCTGCCCTGCTGTTTGGC |
| | | | ACCGGCACAAAGGTGACCGTGCTGGGCGGCGGCGGCTCTGGCGGCGGC |
| | | | GGCAGCGGCGGAGGAGGCTCCATGAGCGGGCGGAGCGCCAACGCAGG |
| | | | GGGCGGCGGCTCCGGAGGAGGGGGCTCTGGAGGCGGCGGCAGCGAGA |
| | | | TCGTGATGACACAGTCCCCAGCCACCCTGAGCGTGTCCCCAGGAGAGA |
| | | | GGGCCACACTGTCTTGTCGCGCCTCTCAGAGCATCTCCATCAATCTGCA |
| | | | CTGGTATCAGCAGAAGCCAGGCCAGGCCCCCCGGCTGCTGATCTATTTC |
| | | | GCCTCTCAGTCCATTTCCGGCATCCCTGCACGCTTCTCTGGCAGCGGCTC |
| | | | CGGCACCGAGTTTACCCTGACAATCTCCTCTCTGCAGAGCGAGGACTTT |
| | | | GCCGTGTACTATTGCCAGCAGTCTAACAGCTTCCCACTGACATTTGGCG |
| | | | GCGGCACCAAGGTGGAGATCAAGGGCGGCTCCGGCGGCGGCTCTGGGG |
| | | | GCGGCAGCGGAGGAGGCTCCGGAGGAGGCTCTGGACAGGTGCAGCTGG |
| | | | TGCAGTCCGGAGCCGAGGTGAAGAAGCCAGGGGCCAGCGTGAAGGTGT |
| | | | CCTGTAAGGCCTCTGGCTACACCTTCACAGATTACTATCTGCATTGGGT |
| | | | GCGGCAGGCCCCCGGACAGGGACTGGAGTGGATGGGCTGGATCGACCC |
| | | | TGAGAATGGCGATACAGAGTACGCCCCAAAGTTTCAGGGCAGAGTGAC |
| | | | CATGACCACAGACACCTCCACATCTACCGCCTATATGGAGCTGAGGAGC |
| | | | CTGCGCTCCGACGATACCGCCGTGTACTATTGTAACGCCAATAAGGAGC |
| | | | TGCGGTATTTCGACGTGTGGGGACAGGGCACAATGGTCACCGTGAGCTC |
| | | | C |
| 163 | 24230 | Full nt | GAGCCAAAGAGCTCCGACAAGACCCACACATGCCCCCCTTGTCCGGCG |
| | | | CCAGAGGCAGCAGGAGGACCAAGCGTGTTCCTGTTTCCACCCAAGCCC |
| | | | AAAGACACCCTGATGATTAGCCGAACCCCTGAAGTCACATGCGTGGTC |
| | | | GTGTCCGTGTCTCACGAGGACCCAGAAGTCAAGTTCAACTGGTACGTGG |
| | | | ATGGCGTCGAGGTGCATAATGCCAAGACAAAACCCCGGGAGGAACAGT |
| | | | ACAACAGCACCTATAGAGTCGTGTCCGTCCTGACAGTGCTGCACCAGGA |
| | | | TTGGCTGAACGGCAAGGAATATAAGTGCAAAGTGTCCAATAAGGCCCT |
| | | | GCCCGCTCCTATCGAGAAAACCATTTCTAAGGCAAAAGGCCAGCCTCGC |
| | | | GAGCCTCAGGTGTACGTGCTGCCACCTTCCCGCGACGAGCTGACCAAGA |
| | | | ATCAGGTGTCTCTGCTGTGCCTGGTGAAGGGCTTCTATCCAAGCGATAT |
| | | | CGCAGTGGAGTGGGAGTCCAACGGACAGCCCGAGAACAATTACCTGAC |
| | | | CTGGCCACCCGTGCTGGACAGCGATGGCTCCTTCTTTCTGTATTCCAAG |
| | | | CTGACAGTGGACAAGTCTAGATGGCAGCAGGGCAACGTGTTCAGCTGT |
| | | | TCCGTGATGCACGAGGCCCTGCACAACCACTACACCCAGAAGTCTCTGA |
| | | | GCTTAAGCCCAGGAGGAGGAGGAGGCTCTGGAGGAGGAGGCTCTATGA |
| | | | GCGGGCGGAGCGCCAACGCAGGGGGAGGAGGCAGCGGGGGAGGAGGC |
| | | | TCCCAGGTGCAGCTGGTGGAGAGCGGCGGCGGCGTGGTGCAGCCCGGC |
| | | | AGAAGCCTGCGGCTGAGCTGTGCAGCCTCCGGCTTCACCTTTAGCTCCT |
| | | | ACGGCATGCACTGGGTGCGGCAGGCCCCTGGCAAGGGACTGGAGTGGG |
| | | | TGGCCTTCATCAGATATGACGGCTCCAATAAGTACTATGCCGATTCTGT |
| | | | GAAGGGCCGGTTTACAATCTCTAGAGACAACAGCAAGAATACCCTGTA |
| | | | CCTGCAGATGAACAGCCTGCGGGCCGAGGACACAGCCGTGTACTATTG |
| | | | CAAGACCCACGGCTCCCACGATAATTGGGGCCAGGGCACAATGGTGAC |
| | | | CGTGTCTTCCGGCGGCGGCGGCTCCATGAGCGGGCGGAGCGCCAACGC |
| | | | AGGGGGTGGAGGCTCCGGAGGAGGAGGCAGCCAGTCCGTGCTGACACA |
| | | | GCCACCTTCTGTGAGCGGAGCCCCCGGACAGAGGGTGACCATCTCCTGT |
| | | | TCTGGCAGCCGCTCCAACATCGGCAGCAATACAGTGAAGTGGTATCAG |
| | | | CAGCTGCCAGGCACCGCCCCCAAGCTGCTGATCTACTATAATGACCAGC |
| | | | GGCCTTCCGGCGTGCCAGATAGATTCTCTGGCAGCAAGTCCGGCACATC |
| | | | TGCCAGCCTGGCCATCACCGGCCTGCAGGCAGAGGACGAGGCCGATTA |
| | | | CTATTGTCAGTCCTACGACAGGTATACACACCCTGCCCTGCTGTTTGGC |
| | | | ACCGGCACAAAGGTGACCGTGCTGGGCGGCGGCGGCTCTGGCGGCGGC |
| | | | GGCAGCGGCGGAGGAGGCTCCATGAGCGGGCGGAGCGCCAACGCAGG |
| | | | GGGCGGCGGCTCCGGAGGAGGGGGCTCTGGAGGCGGCGGCAGCCAGGT |
| | | | GCAGCTGGTGCAGTCCGGAGCCGAGGTGAAGAAGCCAGGGGCCAGCGT |
| | | | GAAGGTGTCTTGCAAGGCCAGCGGCTACACCTTCACAGATTACTATCTG |
| | | | CATTGGGTGCGGCAGGCCCCCGGACAGGGACTGGAGTGGATGGGCTGG |
| | | | ATCGACCCTGAGAATGGCGATACAGAGTACGCCCCAAAGTTTCAGGGC |
| | | | AGAGTGACCATGACCACAGACACCAGCACATCCACCGCCTATATGGAG |
| | | | CTGAGGAGCCTGCGCTCCGACGATACCGCCGTGTACTATTGCAACGCCA |
| | | | ATAAGGAGCTGCGGTATTTCGACGTGTGGGGACAGGGCACAATGGTCA |
| | | | CCGTGTCCTCTGGCGGCTCCGGCGGCGGCTCTGGGGGCGGCAGCGGAG |
| | | | GAGGCTCCGGAGGAGGCTCTGGCGAGATCGTGATGACACAGTCCCCAG |
| | | | CCACCCTGTCTGTGAGCCCAGGAGAGAGGGCCACACTGTCTTGTCGCGC |
| | | | CTCCCAGTCTATCAGCATCAACCTGCACTGGTATCAGCAGAAGCCAGGC |
| | | | CAGGCCCCCCGGCTGCTGATCTATTTCGCCTCCCAGTCCATTAGCGGCA |
| | | | TCCCTGCACGCTTCTCCGGCTCTGGCAGCGGCACCGAGTTTACACTGAC |
| | | | CATCAGCTCCCTGCAGAGCGAGGATTTTGCCGTGTACTATTGCCAGCAG |
| | | | TCCAATTCTTTCCCACTGACATTTGGCGGCGGCACCAAGGTGGAGATCA |
| | | | AG |
| 164 | 24231 | Full nt | GAGCCAAAGAGCTCCGACAAGACCCACACATGCCCCCCTTGTCCGGCG |
| | | | CCAGAGGCTGCAGGAGGACCAAGCGTGTTCCTGTTTCCACCCAAGCCTA |
| | | | AAGACACACTGATGATTTCCCGAACCCCCGAAGTCACATGCGTGGTCGT |
| | | | GTCTGTGAGTCACGAGGACCCTGAAGTCAAGTTCAACTGGTACGTGGAT |
| | | | GGCGTCGAGGTGCATAATGCCAAGACTAAACCTAGGGAGGAACAGTAC |
| | | | AACTCAACCTATCGCGTCGTGAGCGTCCTGACAGTGCTGCACCAGGATT |
| | | | GGCTGAACGGCAAAGAATATAAGTGCAAAGTGAGCAATAAGGCCCTGC |
| | | | CCGCTCCTATCGAGAAAACCATTTCCAAGGCTAAAGGGCAGCCTCGCG |
| | | | AACCACAGGTGTACGTGTATCCCCCTTCCCGGGACGAGCTGACCAAGA |
| | | | ACCAGGTGTCTCTGACATGCCTGGTGAAGGGCTTCTACCCCAGCGATAT |
| | | | CGCCGTGGAGTGGGAGTCCAATGGCCAGCCTGAGAACAATTATAAGAC |
| | | | CACACCACCCGTGCTGGACAGCGATGGCTCCTTCGCCCTGGTGTCCAAG |
| | | | CTGACCGTGGACAAGTCTAGGTGGCAGCAGGGCAACGTGTTTTCTTGCA |
| | | | GCGTGATGCACGAGGCCCTGCACAATCACTACACCCAGAAGTCCCTGA |
| | | | GCTTAAGCCCAGGAGGCAGCGCCGATGGAGGAATCTGGGAGCTGAAGA |
| | | | AGGACGTGTACGTGGTGGAGCTGGACTGGTACCCGGATGCCCCAGGCG |
| | | | AGATGGTGGTGCTGACCTGCGACACACCTGAGGAGGATGGCATCACCT |
| | | | GGACACTGGATCAGAGCTCCGAGGTGCTGGGCTCCGGCAAGACCCTGA |
| | | | CAATCCAGGTGAAGGAGTTCGGCGACGCCGGACAGTACACATGTCACA |
| | | | AGGGAGGAGAGGTGCTGAGCCACTCCCTGCTGCTGCTGCACAAGAAGG |
| | | | AGGACGGCATCTGGAGCACAGACATCCTGAAGGATCAGAAGGAGCCAA |
| | | | AGAACAAGACCTTCCTGCGGTGCGAGGCCAAGAATTATAGCGGCAGAT |
| | | | TCACCTGTTGGTGGCTGACCACAATCAGCACCGATCTGACATTTTCCGT |
| | | | GAAGTCTAGCAGGGGCTCCTCTGACCCCCAGGGAGTGACATGCGGAGC |
| | | | CGCCACCCTGAGCGCCGAGCGGGTGAGAGGCGATAACAAGGAGTACGA |
| | | | GTATTCCGTGGAGTGCCAGGAGGACTCTGCCTGTCCAGCCGCCGAGGA |
| | | | GTCCCTGCCAATCGAAGTGATGGTGGATGCCGTGCACAAGCTGAAGTA |
| | | | CGAGAATTATACAAGCTCCTTCTTTATCAGGGACATCATCAAGCCCGAT |
| | | | CCCCCTAAGAACCTGCAGCTGAAGCCCCTGAAGAACAGCAGACAGGTG |
| | | | GAGGTGAGCTGGGAGTACCCCGACACCTGGAGCACACCTCACTCCTATT |
| | | | TCTCTCTGACCTTTTGCGTGCAGGTGCAGGGCAAGTCTAAGAGGGAGAA |
| | | | GAAGGACCGCGTGTTCACCGATAAGACAAGCGCCACCGTGATCTGTAG |
| | | | AAAGAACGCCTCTATCAGCGTGCGGGCACAGGACCGGTACTACAGCTC |
| | | | CTCTTGGAGCGAGTGGGCCTCCGTGCCCTGCTCTGGAGGAGGAGGCAG |
| | | | CGGCGGAGGAGGCTCCGGAGGCGGCGGCTCTAATCTGCCCGTGGCCAC |
| | | | CCCAGATCCCGGAATGTTCCCTTGCCTGCACCACTCCCAGAACCTGCTG |
| | | | CGCGCCGTGTCTAATATGCTGCAGAAGGCCCGGCAGACCCTGGAGTTTT |
| | | | ACCCCTGTACATCTGAGGAGATCGACCACGAGGATATCACCAAGGACA |
| | | | AGACCAGCACAGTGGAGGCCTGCCTGCCTCTGGAGCTGACAAAGAACG |
| | | | AGAGCTGTCTGAACAGCCGGGAGACCAGCTTCATCACAAACGGCAGCT |
| | | | GCCTGGCCTCCCGGAAGACCTCTTTTATGATGGCCCTGTGCCTGAGCTC |
| | | | CATCTACGAGGATCTGAAGATGTATCAGGTGGAGTTCAAGACAATGAA |
| | | | CGCCAAGCTGCTGATGGACCCTAAGAGACAGATCTTTCTGGATCAGAAC |
| | | | ATGCTGGCCGTGATCGACGAGCTGATGCAGGCCCTGAACTTCAATTCCG |
| | | | AGACCGTGCCTCAGAAGTCTAGCCTGGAGGAGCCAGATTTCTACAAGA |
| | | | CAAAGATCAAGCTGTGCATCCTGCTGCACGCCTTTCGGATCAGAGCCGT |
| | | | GACCATCGACAGAGTGATGAGCTACCTGAACGCCAGCGGCGGCGGCGG |
| | | | CTCCATGAGCGGGCGGAGCGCCAACGCAGGGGGAGGCGGCTCTGGCGG |
| | | | CGGCGGCAGCGGCGGCGGGGGCTCCGGAGGAGGAGGCTCTGGAGGCG |
| | | | GCGGCAGCAAGATCGACGCCTGTAAGCGCGGCGATGTGACCGTGAAGC |
| | | | CTTCCCACGTGATCCTGCTGGGCTCTACCGTGAATATCACATGCAGCCT |
| | | | GAAGCCACGGCAGGGCTGTTTTCACTACTCCCGGAGAAACAAGCTGAT |
| | | | CCTGTATAAGTTCGATAGGCGCATCAACTTTCACCACGGCCACTCTCTG |
| | | | AATAGCCAGGTGACAGGCCTGCCTCTGGGCACCACACTGTTCGTGTGCA |
| | | | AGCTGGCCTGTATCAATTCCGACGAGATCCAGATCTGCGGAGCCGAGAT |
| | | | CTTTGTGGGCGTGGCCCCTGAGCAGCCACAGAACCTGAGCTGCATCCAG |
| | | | AAGGGAGAGCAGGGCACCGTGGCATGTACATGGGAGAGGGGCCGCGA |
| | | | TACCCACCTGTACACCGAGTATACACTGCAGCTGAGCGGCCCAAAGAA |
| | | | CCTGACATGGCAGAAGCAGTGCAAGGACATCTACTGTGACTATCTGGAT |
| | | | TTCGGCATCAACCTGACCCCCGAGTCCCCTGAGTCTAACTTCACCGCCA |
| | | | AGGTGACAGCCGTGAACAGCCTGGGCTCCTCTAGCTCCCTGCCATCCAC |
| | | | CTTCACATTTCTGGATATCGTGAGACCCCTGCCCCCTTGGGACATCAGG |
| | | | ATCAAGTTCCAGAAGGCCAGCGTGTCCCGCTGTACACTGTACTGGCGGG |
| | | | ATGAGGGCCTGGTGCTGCTGAACCGGCTGAGATATAGGCCATCTAATA |
| | | | GCAGACTGTGGAACATGGTGAATGTGACCAAGGCCAAGGGCAGGCACG |
| | | | ACCTGCTGGATCTGAAGCCCTTCACAGAGTACGAGTTTCAGATCTCTAG |
| | | | CAAGCTGCACCTGTATAAGGGCTCCTGGTCTGACTGGAGCGAGTCCCTG |
| | | | AGGGCACAGACCCCAGAGGAGGAGCCA |
| 165 | 24232 | Full nt | GAGCCAAAGAGCTCCGACAAGACCCACACATGCCCCCCTTGTCCGGCG |
| | | | CCAGAGGCAGCAGGAGGACCAAGCGTGTTCCTGTTTCCACCCAAGCCC |
| | | | AAAGACACCCTGATGATTAGCCGAACCCCTGAAGTCACATGCGTGGTC |
| | | | GTGTCCGTGTCTCACGAGGACCCAGAAGTCAAGTTCAACTGGTACGTGG |
| | | | ATGGCGTCGAGGTGCATAATGCCAAGACAAAACCCCGGGAGGAACAGT |
| | | | ACAACAGCACCTATAGAGTCGTGTCCGTCCTGACAGTGCTGCACCAGGA |
| | | | TTGGCTGAACGGCAAGGAATATAAGTGCAAAGTGTCCAATAAGGCCCT |
| | | | GCCCGCTCCTATCGAGAAAACCATTTCTAAGGCAAAAGGCCAGCCTCGC |
| | | | GAGCCTCAGGTGTACGTGCTGCCACCTTCCCGCGACGAGCTGACCAAGA |
| | | | ATCAGGTGTCTCTGCTGTGCCTGGTGAAGGGCTTCTATCCAAGCGATAT |
| | | | CGCAGTGGAGTGGGAGTCCAACGGACAGCCCGAGAACAATTACCTGAC |
| | | | CTGGCCACCCGTGCTGGACAGCGATGGCTCCTTCTTTCTGTATTCCAAG |
| | | | CTGACAGTGGACAAGTCTAGATGGCAGCAGGGCAACGTGTTCAGCTGT |
| | | | TCCGTGATGCACGAGGCCCTGCACAACCACTACACCCAGAAGTCTCTGA |
| | | | GCTTAAGCCCAGGAGGAGGAGGAGGCTCTGGAGGAGGAGGCAGCGGA |
| | | | GGCGGCGGCTCCATGAGCGGGCGGAGCGCCAACGCAGGGGGCGGCGG |
| | | | CTCCGGCGGCGGCGGCTCTGGCGGCGGCGGCAGCTGCCGCACCTCCGA |
| | | | GTGCTGTTTCCAGGACCCCCCTTACCCTGATGCAGACAGCGGCTCCGCC |
| | | | TCTGGACCAAGAGATCTGAGGTGCTATCGCATCAGCTCCGACAGGTACG |
| | | | AGTGTAGCTGGCAGTATGAGGGACCTACCGCCGGGGTGAGCCACTTTCT |
| | | | GCGGTGCTGTCTGTCTAGCGGCAGATGCTGTTACTTCGCCGCCGGGAGC |
| | | | GCCACAAGGCTGCAGTTTAGCGACCAGGCCGGGGTGAGCGTGCTGTAT |
| | | | ACCGTGACACTGTGGGTGGAGTCCTGGGCCAGAAACCAGACCGAGAAG |
| | | | TCTCCTGAGGTGACACTGCAGCTGTACAATTCTGTGAAGTATGAGCCAC |
| | | | CCCTGGGCGATATCAAGGTGAGCAAGCTGGCCGGGCAGCTGAGGATGG |
| | | | AGTGGGAGACCCCAGACAATCAAGTGGGAGCCGAGGTGCAGTTCCGCC |
| | | | ACAGGACACCATCCTCTCCATGGAAGCTGGGCGATTGCGGACCACAGG |
| | | | ACGATGACACAGAGTCCTGCCTGTGCCCTCTGGAGATGAACGTGGCCCA |
| | | | GGAGTTTCAGCTGCGGAGAAGGCAGCTGGGCTCTCAGGGCAGCTCCTG |
| | | | GAGCAAGTGGTCTAGCCCCGTGTGCGTGCCTCCAGAGAATCCCCCTCAG |
| | | | CCCCAG |
| 166 | 24233 | Full nt | GAGCCAAAGAGCTCCGACAAGACCCACACATGCCCCCCTTGTCCGGCG |
| | | | CCAGAGGCAGCAGGAGGACCAAGCGTGTTCCTGTTTCCACCCAAGCCC |
| | | | AAAGACACCCTGATGATTAGCCGAACCCCTGAAGTCACATGCGTGGTC |
| | | | GTGTCCGTGTCTCACGAGGACCCAGAAGTCAAGTTCAACTGGTACGTGG |
| | | | ATGGCGTCGAGGTGCATAATGCCAAGACAAAACCCCGGGAGGAACAGT |
| | | | ACAACAGCACCTATAGAGTCGTGTCCGTCCTGACAGTGCTGCACCAGGA |
| | | | TTGGCTGAACGGCAAGGAATATAAGTGCAAAGTGTCCAATAAGGCCCT |
| | | | GCCCGCTCCTATCGAGAAAACCATTTCTAAGGCAAAAGGCCAGCCTCGC |
| | | | GAGCCTCAGGTGTACGTGCTGCCACCTTCCCGCGACGAGCTGACCAAGA |
| | | | ATCAGGTGTCTCTGCTGTGCCTGGTGAAGGGCTTCTATCCAAGCGATAT |
| | | | CGCAGTGGAGTGGGAGTCCAACGGACAGCCCGAGAACAATTACCTGAC |
| | | | CTGGCCACCCGTGCTGGACAGCGATGGCTCCTTCTTTCTGTATTCCAAG |
| | | | CTGACAGTGGACAAGTCTAGATGGCAGCAGGGCAACGTGTTCAGCTGT |
| | | | TCCGTGATGCACGAGGCCCTGCACAACCACTACACCCAGAAGTCTCTGA |
| | | | GCTTAAGCCCTGGAGGAGGCGGCGGCTCCATGAGCGGGCGGAGCGCCA |
| | | | ACGCAGGGGGAGGAGGCAGCGGCGGAGGAGGCTCCGGCGGCGGCGGC |
| | | | TCTGGAGGAGGAGGCAGCAAGATCGATGCATGCAAGAGGGGCGACGTG |
| | | | ACCGTGAAGCCTAGCCACGTGATCCTGCTGGGCTCCACCGTGAACATCA |
| | | | CATGCTCTCTGAAGCCACGCCAGGGCTGTTTCCACTACTCCCGGAGAAA |
| | | | TAAGCTGATCCTGTATAAGTTCGATAGGCGCATCAACTTTCACCACGGC |
| | | | CACTCTCTGAATAGCCAGGTGACAGGCCTGCCCCTGGGCACCACACTGT |
| | | | TCGTGTGCAAGCTGGCCTGTATCAACAGCGACGAGATCCAGATCTGCGG |
| | | | AGCCGAGATCTTTGTGGGCGTGGCCCCTGGAGGAGGAGGCTCCGGAGG |
| | | | AGGCGGCTCTGGCGGCGGCGGCAGCATGAGCGGGCGGAGCGCCAACGC |
| | | | AGGGGGTGGCGGCAGCGGCGGCGGCGGCTCCGGAGGGGGCGGCTCCTG |
| | | | TCGCACCTCTGAGTGCTGTTTCCAGGACCCCCCTTACCCTGATGCAGAC |
| | | | TCTGGCAGCGCCTCCGGACCAAGAGATCTGAGGTGCTATCGCATCAGCT |
| | | | CCGACAGATACGAGTGTTCTTGGCAGTATGAGGGACCAACCGCCGGGG |
| | | | TGAGCCACTTTCTGCGGTGCTGTCTGTCTAGCGGCAGATGCTGTTACTTC |
| | | | GCCGCCGGGAGCGCCACAAGGCTGCAGTTTTCTGACCAGGCCGGGGTG |
| | | | AGCGTGCTGTATACCGTGACACTGTGGGTGGAGAGCTGGGCCAGAAAC |
| | | | CAGACCGAGAAGTCCCCAGAGGTGACACTGCAGCTGTACAATTCCGTG |
| | | | AAGTATGAGCCACCCCTGGGCGATATCAAGGTGTCTAAGCTGGCCGGG |
| | | | CAGCTGAGGATGGAGTGGGAGACCCCCGACAATCAAGTGGGAGCCGAG |
| | | | GTGCAGTTCCGCCACAGGACACCATCCTCTCCATGGAAGCTGGGCGATT |
| | | | GCGGACCACAGGACGATGACACCGAGTCCTGCCTGTGCCCTCTGGAGA |
| | | | TGAACGTGGCCCAGGAGTTTCAGCTGCGGAGAAGGCAGCTGGGCTCCC |
| | | | AGGGCAGCTCCTGGTCTAAGTGGTCTAGCCCCGTGTGCGTGCCTCCAGA |
| | | | GAATCCCCCTCAGCCCCAG |
| 167 | 24235 | Full nt | AAGATCGACGCATGCAAGAGGGGCGATGTGACAGTGAAGCCTTCTCAC |
| | | | GTGATCCTGCTGGGCAGCACCGTGAACATCACATGCTCCCTGAAGCCCA |
| | | | GACAGGGCTGTTTTCACTACTCCCGGAGAAATAAGCTGATCCTGTATAA |
| | | | GTTCGATAGGCGCATCAACTTTCACCACGGCCACTCTCTGAATAGCCAG |
| | | | GTGACCGGACTGCCTCTGGGCACCACACTGTTCGTGTGCAAGCTGGCCT |
| | | | GTATCAACTCTGACGAGATCCAGATCTGTGGAGCCGAGATCTTTGTGGG |
| | | | CGTGGCCCCAGGAGGAGGAGGCAGCGGAGGAGGCGGCAGCATGAGCG |
| | | | GCAGAAGCGCCAACGCCGGAGGAGGAGGCAGCAGAAATCTGCCAGTG |
| | | | GCCACACCAGACCCCGGAATGTTCCCTTGCCTGCACCACTCCCAGAACC |
| | | | TGCTGAGGGCCGTGTCTAATATGCTGCAGAAGGCCCGCCAGACCCTGG |
| | | | AGTTTTACCCATGTACAAGCGAGGAGATCGACCACGAGGATATCACCA |
| | | | AGGATAAGACCTCCACAGTGGAGGCATGCCTGCCACTGGAGCTGACAA |
| | | | AGAACGAGTCCTGTCTGAACAGCCGGGAGACCAGCTTCATCACAAACG |
| | | | GCTCCTGCCTGGCCTCTAGAAAGACCAGCTTTATGATGGCCCTGTGCCT |
| | | | GAGCTCCATCTACGAGGACCTGAAGATGTATCAGGTGGAGTTCAAGAC |
| | | | AATGAACGCCAAGCTGCTGATGGACCCCAAGCGGCAGATCTTTCTGGAT |
| | | | CAGAATATGCTGGCCGTGATCGACGAGCTGATGCAGGCCCTGAACTTCA |
| | | | ATAGCGAGACCGTGCCTCAGAAGTCTAGCCTGGAGGAGCCAGATTTCT |
| | | | ACAAGACAAAGATCAAGCTGTGCATCCTGCTGCACGCCTTTCGGATCAG |
| | | | AGCCGTGACCATCGACAGAGTGATGTCCTACCTGAACGCCAGCGGCGG |
| | | | CGGCGGCAGCGGCGGAGGCGGCTCCGAGCCTAAGTCCTCTGATAAGAC |
| | | | CCACACATGCCCCCCTTGTCCGGCGCCAGAGGCTGCAGGAGGACCAAG |
| | | | CGTGTTCCTGTTTCCACCCAAGCCTAAAGACACACTGATGATTTCCCGA |
| | | | ACCCCCGAAGTCACATGCGTGGTCGTGTCTGTGAGTCACGAGGACCCTG |
| | | | AAGTCAAGTTCAACTGGTACGTGGATGGCGTCGAGGTGCATAATGCCA |
| | | | AGACTAAACCTAGGGAGGAACAGTACAACTCAACCTATCGCGTCGTGA |
| | | | GCGTCCTGACAGTGCTGCACCAGGATTGGCTGAACGGCAAAGAATATA |
| | | | AGTGCAAAGTGAGCAATAAGGCCCTGCCCGCTCCTATCGAGAAAACCA |
| | | | TTTCCAAGGCTAAAGGGCAGCCTCGCGAACCACAGGTCTACGTGTATCC |
| | | | TCCAAGCCGGGACGAGCTGACAAAGAACCAGGTCTCCCTGACTTGTCTG |
| | | | GTGAAAGGGTTTTACCCTAGTGATATCGCTGTGGAGTGGGAATCAAATG |
| | | | GACAGCCAGAGAACAATTATAAGACTACCCCCCCTGTGCTGGACAGTG |
| | | | ATGGGTCATTCGCACTGGTCTCCAAGCTGACAGTGGACAAATCTCGGTG |
| | | | GCAGCAGGGAAATGTCTTTTCATGTAGCGTGATGCATGAAGCACTGCAC |
| | | | AACCATTACACCCAGAAGTCACTGTCACTGTCACCAGGA |
| 168 | 24236 | Full nt | TGCAGGACAAGCGAGTGCTGTTTTCAGGACCCCCCTTACCCAGATGCAG |
| | | | ACAGCGGCTCCGCCTCTGGACCCCGGGACCTGCGGTGCTATAGAATCAG |
| | | | CTCCGACCGCTACGAGTGTTCTTGGCAGTATGAGGGACCTACCGCCGGG |
| | | | GTGAGCCACTTCCTGAGGTGCTGTCTGTCTAGCGGCAGATGCTGTTACT |
| | | | TCGCCGCCGGGAGCGCCACAAGGCTGCAGTTTTCTGACCAGGCCGGGG |
| | | | TGAGCGTGCTGTATACCGTGACACTGTGGGTGGAGAGCTGGGCCAGAA |
| | | | ACCAGACCGAGAAGTCCCCAGAGGTGACACTGCAGCTGTACAATTCCG |
| | | | TGAAGTATGAGCCACCCCTGGGCGATATCAAGGTGTCTAAGCTGGCCG |
| | | | GGCAGCTGAGGATGGAGTGGGAGACCCCCGACAATCAAGTGGGAGCCG |
| | | | AGGTGCAGTTCCGCCACAGGACACCTTCCTCTCCATGGAAGCTGGGCGA |
| | | | TTGCGGCCCACAGGACGATGACACCGAGAGCTGCCTGTGCCCCCTGGA |
| | | | GATGAACGTGGCCCAGGAGTTTCAGCTGCGGAGAAGGCAGCTGGGCTC |
| | | | CCAGGGCAGCTCCTGGTCTAAGTGGTCTAGCCCCGTGTGCGTGCCTCCA |
| | | | GAGAATCCCCCTCAGCCACAGGGCGGCGGCGGCTCTGGAGGAGGAGGC |
| | | | AGCGGCGGAGGAGGCTCCGGAGGCGGCGGCAGCATGTCCGGCAGGTCC |
| | | | GCCAACGCCGAGCCCAAGTCCTCTGACAAGACCCACACATGCCCACCCT |
| | | | GTCCGGCGCCAGAGGCCGCCGGAGGACCAAGCGTGTTCCTGTTTCCACC |
| | | | CAAGCCCAAGGACACCCTGATGATCTCCCGGACCCCAGAGGTGACATG |
| | | | CGTGGTGGTGAGCGTGTCCCACGAGGACCCCGAGGTGAAGTTTAACTG |
| | | | GTACGTGGATGGCGTGGAGGTGCACAATGCCAAGACAAAGCCCCGGGA |
| | | | GGAGCAGTACAATTCTACCTATAGAGTGGTGAGCGTGCTGACAGTGCTG |
| | | | CACCAGGATTGGCTGAACGGCAAGGAGTATAAGTGTAAGGTGAGCAAT |
| | | | AAGGCCCTGCCAGCCCCCATCGAGAAGACCATCTCCAAGGCCAAGGGC |
| | | | CAGCCTCGCGAACCACAGGTCTACGTGCTGCCCCCTAGCCGCGACGAAC |
| | | | TGACTAAAAATCAGGTCTCTCTGCTGTGTCTGGTCAAAGGATTCTACCC |
| | | | TTCCGACATCGCCGTGGAGTGGGAAAGTAACGGCCAGCCCGAGAACAA |
| | | | TTACCTGACCTGGCCCCCTGTGCTGGACTCTGATGGGAGTTTCTTTCTGT |
| | | | ATTCAAAGCTGACAGTCGATAAAAGCCGGTGGCAGCAGGGCAATGTGT |
| | | | TCAGCTGCTCCGTCATGCACGAAGCACTGCACAACCATTACACTCAGAA |
| | | | GTCCCTGTCCCTGTCACCTGGC |
| 169 | 24246 | Full nt | GAGCCAAAGAGCTCCGACAAGACCCACACATGCCCCCCTTGTCCGGCG |
| | | | CCAGAGGCTGCAGGAGGACCAAGCGTGTTCCTGTTTCCACCCAAGCCTA |
| | | | AAGACACACTGATGATTTCCCGAACCCCCGAAGTCACATGCGTGGTCGT |
| | | | GTCTGTGAGTCACGAGGACCCTGAAGTCAAGTTCAACTGGTACGTGGAT |
| | | | GGCGTCGAGGTGCATAATGCCAAGACTAAACCTAGGGAGGAACAGTAC |
| | | | AACTCAACCTATCGCGTCGTGAGCGTCCTGACAGTGCTGCACCAGGATT |
| | | | GGCTGAACGGCAAAGAATATAAGTGCAAAGTGAGCAATAAGGCCCTGC |
| | | | CCGCTCCTATCGAGAAAACCATTTCCAAGGCTAAAGGGCAGCCTCGCG |
| | | | AACCACAGGTGTACGTGTATCCCCCTTCCCGGGACGAGCTGACCAAGA |
| | | | ACCAGGTGTCTCTGACATGCCTGGTGAAGGGCTTCTACCCCAGCGATAT |
| | | | CGCCGTGGAGTGGGAGTCCAATGGCCAGCCTGAGAACAATTATAAGAC |
| | | | CACACCACCCGTGCTGGACAGCGATGGCTCCTTCGCCCTGGTGTCCAAG |
| | | | CTGACCGTGGACAAGTCTAGGTGGCAGCAGGGCAACGTGTTTTCTTGCA |
| | | | GCGTGATGCACGAGGCCCTGCACAATCACTACACCCAGAAGTCCCTGA |
| | | | GCTTAAGCCCTGGCGGCGGCGGCGGCTCCATGAGCGGGCGGAGCGCCA |
| | | | ACGCAGGGGGAGGAGGCTCCGGCGGAGGAGGCTCTGGCGGCGGCGGC |
| | | | AGCGGAGGAGGCGGCTCCAAGATCGACGCCTGCAAGCGGGGCGATGTG |
| | | | ACCGTGAAGCCCTCCCACGTGATCCTGCTGGGCTCTACCGTGAACATCA |
| | | | CATGCAGCCTGAAGCCTAGACAGGGCTGTTTCCACTACAGCCGGAGAA |
| | | | ATAAGCTGATCCTGTATAAGTTCGATAGGCGCATCAACTTTCACCACGG |
| | | | CCACTCTCTGAATAGCCAGGTGACAGGCCTGCCTCTGGGCACCACACTG |
| | | | TTCGTGTGCAAGCTGGCCTGTATCAATTCCGACGAGATCCAGATCTGTG |
| | | | GAGCCGAGATCTTTGTGGGCGTGGCCCCAGGAGGAGGAGGCTCTGGAG |
| | | | GAGGCGGCAGCATGAGCGGGCGGAGCGCCAACGCAGGGGGTGGAGGC |
| | | | TCTCGCAATCTGCCTGTGGCCACCCCCGATCCTGGCATGTTCCCATGCCT |
| | | | GCACCACAGCCAGAACCTGCTGCGGGCCGTGTCCAATATGCTGCAGAA |
| | | | GGCCAGACAGACCCTGGAGTTTTACCCATGTACATCTGAGGAGATCGAC |
| | | | CACGAGGATATCACCAAGGACAAGACCAGCACAGTGGAGGCATGCCTG |
| | | | CCACTGGAGCTGACAAAGAACGAGTCCTGTCTGAACAGCCGGGAGACC |
| | | | AGCTTCATCACAAACGGCTCCTGCCTGGCCTCTCGCAAGACCAGCTTTA |
| | | | TGATGGCCCTGTGCCTGAGCTCCATCTACGAGGATCTGAAGATGTATCA |
| | | | GGTGGAGTTCAAGACAATGAACGCCAAGCTGCTGATGGACCCTAAGAG |
| | | | GCAGATCTTTCTGGATCAGAATATGCTGGCCGTGATCGACGAGCTGATG |
| | | | CAGGCCCTGAACTTTAATTCCGAGACCGTGCCACAGAAGTCTAGCCTGG |
| | | | AGGAGCCCGATTTCTACAAGACAAAGATCAAGCTGTGCATCCTGCTGCA |
| | | | CGCCTTTCGGATCAGAGCCGTGACCATCGACCGCGTGATGTCTTACCTG |
| | | | AACGCCAGC |
| 170 | | PCS^{a} | LSGRSDDH |
| 171 | | PCS | ISSGLLSGRSDNH |
| 172 | | PCS | ISSGLLSGRSDQH |
| 173 | | PCS | ISSGLLSGRSDDH |
| 174 | | PCS | LSGRSGNH |
| 175 | | PCS | TSTSGRSANPRG |
| 176 | | PCS | ISSGLLSS |
| 177 | | PCS | QNQALRMA |
| 178 | | PCS | VHMPLGFLGP |
| 179 | | PCS | AVGLLAPP |
| 180 | | PCS | LSGRSDDH |
| 181 | | PCS | LSGRSDIH |
| 182 | | PCS | LSGRSDQH |
| 183 | | PCS | LSGRSDTH |
| 184 | | PCS | LSGRSDYH |
| 185 | | PCS | LSGRSDNP |
| 186 | | PCS | LSGRSANP |
| 187 | | PCS | LSGRSANI |
| 188 | | PCS | LSGRSDNI |
| 189 | | PCS | ISSGLLSGRSDNH |
| 190 | | PCS | ISSGLLSGRSGNH |
| 191 | | PCS | ISSGLLSGRSANPRG |
| 192 | | PCS | AVGLLAPPSGRSANPRG |
| 193 | | PCS | ISSGLLSGRSDDH |
| 194 | | PCS | ISSGLLSGRSDIH |
| 195 | | PCS | ISSGLLSGRSDQH |
| 196 | | PCS | ISSGLLSGRSDTH |
| 197 | | PCS | ISSGLLSGRSDYH |
| 198 | | PCS | ISSGLLSGRSDNP |
| 199 | | PCS | ISSGLLSGRSANP |
| 200 | | PCS | ISSGLLSGRSANI |
| 201 | | PCS | ISSGLLSGRSDNI |
| 202 | | PCS | AVGLLAPPGGLSGRSDNH |
| 203 | | PCS | AVGLLAPPGGLSGRSDDH |
| 204 | | PCS | AVGLLAPPGGLSGRSDIH |
| 205 | | PCS | AVGLLAPPGGLSGRSDQH |
| 206 | | PCS | AVGLLAPPGGLSGRSDTH |
| 207 | | PCS | AVGLLAPPGGLSGRSDYH |
| 208 | | PCS | AVGLLAPPGGLSGRSDNP |
| 209 | | PCS | AVGLLAPPGGLSGRSANP |
| 210 | | PCS | AVGLLAPPGGLSGRSANI |
| 211 | | PCS | AVGLLAPPGGLSGRSDNI |
| 212 | | PCS | PRFKIIGG |
| 213 | | PCS | PRFRIIGG |
| 214 | | PCS | SSRHRRALD |
| 215 | | PCS | RKSSIIIRMRDVVL |
| 216 | | PCS | SSSFDKGKYKKGDDA |
| 217 | | PCS | SSSFDKGKYKRGDDA |
| 218 | | PCS | IEGR |
| 219 | | PCS | IDGR |
| 220 | | PCS | GGSIDGR |
| 221 | | PCS | PLGLWA |
| 222 | | PCS | GPQGIAGQ |
| 223 | | PCS | GPQGLLGA |
| 224 | | PCS | GIAGQ |
| 225 | | PCS | GPLGIAGI |
| 226 | | PCS | GPEGLRVG |
| 227 | | PCS | YGAGLGVV |
| 228 | | PCS | AGLGVVER |
| 229 | | PCS | AGLGISST |
| 230 | | PCS | EPQALAMS |
| 231 | | PCS | QALAMSAI |
| 232 | | PCS | AAYHLVSQ |
| 233 | | PCS | MDAFLESS |
| 234 | | PCS | ESLPVVAV |
| 235 | | PCS | SAPAVESE |
| 236 | | PCS | DVAQFVLT |
| 237 | | PCS | VAQFVLTE |
| 238 | | PCS | AQFVLTEG |
| 239 | | PCS | PVQPIGPQ |
| 240 | | Linker | GSADGG |
| 241 | | Linker | PQGQGGGGSGGGGNSP |
| 242 | | Linker | QGQSGQGG |
| 243 | | WT Hep- | QGKSKREKK |
| | | Loop | |
| 244 | | Hep-Loop^{c} | QGSEK |
| 245 | | Hep-Loop | KDQTE |
| 246 | | Hep-Loop | QDDSE |
| 247 | | Hep-Loop | QDQTD |
| 248 | | Hep-Loop | QGEKK |
| 249 | | Hep-Loop | RDDSE |
| 250 | | Hep-Loop | QGSQEKK |
| 251 | | Hep-Loop | QGESKQEKK |
| 252 | | IL12Rβ1 | MEPLVTWVVPLLFLFLLSRQGAACRTSECCFQDPPYPDADSGSASGPRDLR |
| | | Uniprot | CYRISSDRYECSWQYEGPTAGVSHFLRCCLSSGRCCYFAAGSATRLQFSDQ |
| | | P42701 | AGVSVLYTVTLWVESWARNQTEKSPEVTLQLYNSVKYEPPLGDIKVSKLA |
| | | | GQLRMEWETPDNQVGAEVQFRHRTPSSPWKLGDCGPQDDDTESCLCPLE |
| | | | MNVAQEFQLRRRQLGSQGSSWSKWSSPVCVPPENPPQPQVRFSVEQLGQD |
| | | | GRRRLTLKEQPTQLELPEGCQGLAPGTEVTYRLQLHMLSCPCKAKATRTL |
| | | | HLGKMPYLSGAAYNVAVISSNQFGPGLNQTWHIPADTHTEPVALNISVGTN |
| | | | GTTMYWPARAQSMTYCIEWQPVGQDGGLATCSLTAPQDPDPAGMATYS |
| | | | WSRESGAMGQEKCYYITIFASAHPEKLTLWSTVLSTYHFGGNASAAGTPH |
| | | | HVSVKNHSLDSVSVDWAPSLLSTCPGVLKEYVVRCRDEDSKQVSEHPVQP |
| | | | TETQVTLSGLRAGVAYTVQVRADTAWLRGVWSQPQRFSIEVQVSDWLIFF |
| | | | ASLGSFLSILLVGVLGYLGLNRAARHLCPPLPTPCASSAIEFPGGKETWQWI |
| | | | NPVDFQEEASLQEALVVEMSWDKGERTEPLEKTELPEGAPELALDTELSLE |
| | | | DGDRCKAKM |
| 253 | | IL12Rβ2 | MAHTFRGCSLAFMFIITWLLIKAKIDACKRGDVTVKPSHVILLGSTVNITCS |
| | | Uniprot | LKPRQGCFHYSRRNKLILYKFDRRINFHHGHSLNSQVTGLPLGTTLFVCKL |
| | | Q99665 | ACINSDEIQICGAEIFVGVAPEQPQNLSCIQKGEQGTVACTWERGRDTHLYT |
| | | | EYTLQLSGPKNLTWQKQCKDIYCDYLDFGINLTPESPESNFTAKVTAVNSL |
| | | | GSSSSLPSTFTFLDIVRPLPPWDIRIKFQKASVSRCTLYWRDEGLVLLNRLRY |
| | | | RPSNSRLWNMVNVTKAKGRHDLLDLKPFTEYEFQISSKLHLYKGSWSDWS |
| | | | ESLRAQTPEEEPTGMLDVWYMKRHIDYSRQQISLFWKNLSVSEARGKILHY |
| | | | QVTLQELTGGKAMTQNITGHTSWTTVIPRTGNWAVAVSAANSKGSSLPTRI |
| | | | NIMNLCEAGLLAPRQVSANSEGMDNILVTWQPPRKDPSAVQEYVVEWREL |
| | | | HPGGDTQVPLNWLRSRPYNVSALISENIKSYICYEIRVYALSGDQGGCSSIL |
| | | | GNSKHKAPLSGPHINAITEEKGSILISWNSIPVQEQMGCLLHYRIYWKERDS |
| | | | NSQPQLCEIPYRVSQNSHPINSLQPRVTYVLWMTALTAAGESSHGNEREFC |
| | | | LQGKANWMAFVAPSICIAIIMVGIFSTHYFQQKVFVLLAALRPQWCSREIPD |
| | | | PANSTCAKKYPIAEEKTQLPLDRLLIDWPTPEDPEPLVISEVLHQVTPVFRHP |
| | | | PCSNWPQREKGIQGHQASEKDMMHSASSPPPPRALQAESRQLVDLYKVLE |
| | | | SRGSDPKPENPACPWTVLPAGDLPTHDGYLPSNIDDLPSHEAPLADSLEELE |
| | | | PQHISLSVFPSSSLHPLTFSCGDKLTLDQLKMRCDSLML |
| 254 | | Human | APELLGGPSVFLFPPKPKDTLMISRTPEVTCVVVDVSHEDPEVKFNWYVDG |
| | | IgG1 Fc | VEVHNAKTKPREEQYNSTYRVVSVLTVLHQDWLNGKEYKCKVSNKALPA |
| | | 231-447 | PIEKTISKAKGQPREPQVYTLPPSRDELTKNQVSLTCLVKGFYPSDIAVEWE |
| | | (EU- | SNGQPENNYKTTPPVLDSDGSFFLYSKLTVDKSRWQQGNVFSCSVMHEAL |
| | | numbering) | HNHYTQKSLSLSPGK |
| 255 | | h6F6 VH | QVQLVQSGAEVKKPGASVKVSCKASGYTFTDYYLHWVRQAPGQGLEWM |
| | | | GWIDPENGDTEYAPKFQGRVTMTTDTSTSTAYMELRSLRSDDTAVYYCNA |
| | | | NKELRYFDVWGQGTMVTVSS |
| 256 | | h6F6 VLAR | EIVMTQSPATLSVSPGERATLSCRASQSISINLHWYQQKPGQAPRLLIYFAS |
| | | | QSISGIPARFSGSGSGTEFTLTISSLQSEDFAVYYCQQSNSFPLTFGGGTKVEI |
| | | | K |
| 257 | | h6F6 | DYYLH |
| | | VHCDR1 | |
| 258 | | h6F6 | WIDPENGDTEYAPKFQG |
| | | VHCDR2 | |
| 259 | | h6F6 | NKELRYFDV |
| | | VHCDR3 | |
| 260 | | h6F6 | RASQSISINLH |
| | | VLCDR1 | |
| 261 | | h6F6 | FASQSIS |
| | | VLCDR2 | |
| 262 | | h6F6 | QQSNSFPLT |
| | | VLCDR3 | |
| 263 | | IL23R Full | MNQVTIQWDAVIALYILFSWCHGGITNINCSGHIWVEPATIFKMGMNISIYC |
| | | Uniprot | QAAIKNCQPRKLHFYKNGIKERFQITRINKTTARLWYKNFLEPHASMYCTA |
| | | Q5VWK5 | ECPKHFQETLICGKDISSGYPPDIPDEVTCVIYEYSGNMTCTWNAGKLTYID |
| | | | TKYVVHVKSLETEEEQQYLTSSYINISTDSLQGGKKYLVWVQAANALGME |
| | | | ESKQLQIHLDDIVIPSAAVISRAETINATVPKTIIYWDSQTTIEKVSCEMRYK |
| | | | ATTNQTWNVKEFDTNFTYVQQSEFYLEPNIKYVFQVRCQETGKRYWQPW |
| | | | SSLFFHKTPETVPQVTSKAFQHDTWNSGLTVASISTGHLTSDNRGDIGLLLG |
| | | | MIVFAVMLSILSLIGIFNRSFRTGIKRRILLLIPKWLYEDIPNMKNSNVVKML |
| | | | QENSELMNNNSSEQVLYVDPMITEIKEIFIPEHKPTDYKKENTGPLETRDYP |
| | | | QNSLFDNTTVVYIPDLNTGYKPQISNFLPEGSHLSNNNEITSLTLKPPVDSLD |
| | | | SGNNPRLQKHPNFAFSVSSVNSLSNTIFLGELSLILNQGECSSPDIQNSVEEE |
| | | | TTMLLENDSPSETIPEQTLLPDEFVSCLGIVNEELPSINTYFPQNILESHFNRIS |
| | | | LLEK |
| 264 | | IL23R_ECD_ | GITNINCSGHIWVEPATIFKMGMNISIYCQAAIKNCQPRKLHFYKNGIKERF |
| | | 24-355 | QITRINKTTARLWYKNFLEPHASMYCTAECPKHFQETLICGKDISSGYPPDIP |
| | | Q5VWK5 | DEVTCVIYEYSGNMTCTWNAGKLTYIDTKYVVHVKSLETEEEQQYLTSSYI |
| | | | NISTDSLQGGKKYLVWVQAANALGMEESKQLQIHLDDIVIPSAAVISRAETI |
| | | | NATVPKTIIYWDSQTTIEKVSCEMRYKATTNQTWNVKEFDTNFTYVQQSEF |
| | | | YLEPNIKYVFQVRCQETGKRYWQPWSSLFFHKTPETVPQVTSKAFQHDTW |
| | | | NSGLTVASISTGHLTSDNRGDIG |
| 265 | | IL23R_ECD_ | GITNINCSGHIWVEPATIFKMGMNISIYCQAAIKNCQPRKLHFYKNGIKERF |
| | | 24-318 (Ig, | QITRINKTTARLWYKNFLEPHASMYCTAECPKHFQETLICGKDISSGYPPDIP |
| | | FN3-1 and | DEVTCVIYEYSGNMTCTWNAGKLTYIDTKYVVHVKSLETEEEQQYLTSSYI |
| | | FN3-2 | NISTDSLQGGKKYLVWVQAANALGMEESKQLQIHLDDIVIPSAAVISRAETI |
| | | domains) | NATVPKTIIYWDSQTTIEKVSCEMRYKATTNQTWNVKEFDTNFTYVQQSEF |
| | | Q5VWK5 | YLEPNIKYVFQVRCQETGKRYWQPWSSLFFHKTPET |
| 266 | | IL23R_ECD | GITNINCSGHIWVEPATIFKMGMNISIYCQAAIKNCQPRKLHFYKNGIKERF |
| | | _24-126(Ig | QITRINKTTARLWYKNFLEPHASMYCTAECPKHFQETLICGKDISSGYPPD |
| | | domain) | |
| | | Q5VWK5 | |
| 267 | | p40-L-p35 | IWELKKDVYVVELDWYPDAPGEMVVLTCDTPEEDGITWTLDQSSEVLGSG |
| | | (See | KTLTIQVKEFGDAGQYTCHKGGEVLSHSLLLLHKKEDGIWSTDILKDQKEP |
| | | CL_# 17876) | KNKTFLRCEAKNYSGRFTCWWLTTISTDLTFSVKSSRGSSDPQGVTCGAAT |
| | | | LSAERVRGDNKEYEYSVECQEDSACPAAEESLPIEVMVDAVHKLKYENYT |
| | | | SSFFIRDIIKPDPPKNLQLKPLKNSRQVEVSWEYPDTWSTPHSYFSLTFCVQV |
| | | | QGKSKREKKDRVFTDKTSATVICRKNASISVRAQDRYYSSSWSEWASVPCS |
| | | | GGGGSGGGGSGGGGSRNLPVATPDPGMFPCLHHSQNLLRAVSNMLQKAR |
| | | | QTLEFYPCTSEEIDHEDITKDKTSTVEACLPLELTKNESCLNSRETSFITNGSC |
| | | | LASRKTSFMMALCLSSIYEDLKMYQVEFKTMNAKLLMDPKRQIFLDQNML |
| | | | AVIDELMQALNFNSETVPQKSSLEEPDFYKTKIKLCILLHAFRIRAVTIDRV |
| | | | MSYLNAS |
| 268 | | p4O-L- | IWELKKDVYVVELDWYPDAPGEMVVLTCDTPEEDGITWTLDQSSEVLGSG |
| | | p35AR (See | KTLTIQVKEFGDAGQYTCHKGGEVLSHSLLLLHKKEDGIWSTDILKDQKEP |
| | | CL_#22279) | KNKTFLRCEAKNYSGRFTCWWLTTISTDLTFSVKSSRGSSDPQGVTCGAAT |
| | | | LSAERVRGDNKEYEYSVECQEDSACPAAEESLPIEVMVDAVHKLKYENYT |
| | | | SSFFIRDIIKPDPPKNLQLKPLKNSRQVEVSWEYPDTWSTPHSYFSLTFCVQV |
| | | | QGKSKREKKDRVFTDKTSATVICRKNASISVRAQDRYYSSSWSEWASVPCS |
| | | | GGGGSGGGGSGGGGSNLPVATPDPGMFPCLHHSQNLLRAVSNMLQKARQ |
| | | | TLEFYPCTSEEIDHEDITKDKTSTVEACLPLELTKNESCLNSRETSFITNGSCL |
| | | | ASRKTSFMMALCLSSIYEDLKMYQVEFKTMNAKLLMDPKRQIFLDQNML |
| | | | AVIDELMQALNFNSETVPQKSSLEEPDFYKTKIKLCILLHAFRIRAVTIDRV |
| | | | MSYLNAS |
| 269 | | p40HEP-L- | IWELKKDVYVVELDWYPDAPGEMVVLTCDTPEEDGITWTLDQSSEVLGSG |
| | | p35ΔR (Hep | KTLTIQVKEFGDAGQYTCHKGGEVLSHSLLLLHKKEDGIWSTDILKDQKEP |
| | | graft as in | KNKTFLRCEAKNYSGRFTCWWLTTISTDLTFSVKSSRGSSDPQGVTCGAAT |
| | | v30818- | LSAERVRGDNKEYEYSVECQEDSACPAAEESLPIEVMVDAVHKLKYENYT |
| | | See | SSFFIRDIIKPDPPKNLQLKPLKNSRQVEVSWEYPDTWSTPHSYFSLTFCVQV |
| | | CL_#22291) | QGESKQEKKDRVFTDKTSATVICRKNASISVRAQDRYYSSSWSEWASVPCS |
| | | | GGGGSGGGGSGGGGSNLPVATPDPGMFPCLHHSQNLLRAVSNMLQKARQ |
| | | | TLEFYPCTSEEIDHEDITKDKTSTVEACLPLELTKNESCLNSRETSFITNGSCL |
| | | | ASRKTSFMMALCLSSIYEDLKMYQVEFKTMNAKLLMDPKRQIFLDQNML |
| | | | AVIDELMQALNFNSETVPQKSSLEEPDFYKTKIKLCILLHAFRIRAVTIDRV |
| | | | MSYLNAS |
| 270 | | h6F6 VL | EIVMTQSPATLSVSPGERATLSCRASQSISINLHWYQQKPGQAPRLLIYFAS |
| | | Full | QSISGIPARFSGSGSGTEFTLTISSLQSEDFAVYYCQQSNSFPLTFGGGTKVEI |
| | | | KR |
| 271 | | | anti-CD3 paratope was described in |
| | | | US20150232557A1 (VL SEQ ID NO: 271). |
| 272 | | | anti-CD3 paratope was described in |
| | | | US20150232557A1 (VH SEQ ID NO: 272). |
| 273 | | | DIQMTQSPSSLSASVGDRVTITCRASQDVNTAVAWYQQK |
| | | | PGKAPKLLIYSASFLYSGVPSRFSGSRSGTDFTLTISSL |
| | | | QPEDFATYYCQQHYTTPPTFGQGTKVEIKGGSGGGSGGG |
| | | | SGGGSGGGSGEVQLVESGGGLVQPGGSLRLSCAASGFNI |
| | | | KDTYIHWVRQAPGKGLEWVARIYPTNGYTRYADSVKGRF |
| | | | TISADTSKNTAYLQMNSLRAEDTAVYYCSRWGGDGFYAM |
| | | | DYWGQGTLVTVSS |
| 274 | | | GQPREPQVYVYPPSRDELTKNQVSLTCLVKGFYPSDIAV |
| | | | EWESNGQPENNYKTTPPVLDSDGSFALVSKLTVDKSRWQ |
| | | | QGNVFSCSVMHEALHNHYTQKSLSLSPG |
| 275 | | | GQPREPQVYVLPPSRDELTKNQVSLLCLVKGFYPSDIAV |
| | | | EWESNGQPENNYLTWPPVLDSDGSFFLYSKLTVDKSRWQ |
| | | | QGNVFSCSVMHEALHNHYTQKSLSLSPG |
| 276 | | | APEAAGGPSVFLFPPKPKDTLMISRTPEVTCVVVSVSHE |
| | | | DPEVKFNWYVDGVEVHNAKTKPREEQYNSTYRVVSVLTV |
| | | | LHQDWLNGKEYKCKVSNKALPAPIEKTISKAK |
| 277 | | | NPPTFSPALLVVTEGDNATFTCSFSNTSESFVLNWYRMS |
| | | | PSNQTDKLAAFPEDRSQPGQDCRFRVTQLPNGRDFHMSV |
| | | | VRARRNDSGTYLCGAISLAPKAQIKESLRAELRVTE |
| 278 | | | AFTVTVPKDLYVVEYGSNMTIECKFPVEKQLDLAALIVY |
| | | | WEMEDKNIIQFVHGEEDLKVQHSSYRQRARLLKDQLSLG |
| | | | NAALQITDVKLQDAGVYRCMISYGGADYKRITVKVNA |
| 279 | | | NPPTFSPALLVVTEGDNATFTCSFSNTSESFHVVWHRES |
| | | | PSGQTDTLAAFPEDRSQPGQDARFRVTQLPNGRDFHMSV |
| | | | VRARRNDSGTYVCGVISLAPKIQIKESLRAELRVTE |
| 280 | 12985 | full AA | DIQMTQSPSSLSASVGDRVTMTCSASSSVSYMNWYQQKPGKAPKRWIYDS |
| | | | SKLASGVPARFSGSGSGTDYTLTISSLQPEDFATYYCQQWSRNPPTFGGGT |
| | | | KLQITRTVAAPSVFIFPPSDEQLKSGTASVVCLLNNFYPREAKVQWKVDNA |
| | | | LQSGNSQESVTEQDSKDSTYSLSSTLTLSKADYEKHKVYACEVTHQGLSSP |
| | | | VTKSFNRGEC |
| 281 | 12989 | full AA | QVQLVESGGGVVQPGRSLRLSCKASGYTFTRSTMHWVRQAPGQGLEWIG |
| | | | YINPSSAYTNYNQKFKDRFTISADKSKSTAFLQMDSLRPEDTGVYFCARPQ |
| | | | VHYDYNGFPYWGQGTPVTVSSASTKGPSVFPLAPSSKSTSGGTAALGCLV |
| | | | KDYFPEPVTVSWNSGALTSGVHTFPAVLQSSGLYSLSSVVTVPSSSLGTQT |
| | | | YICNVNHKPSNTKVDKKVEPKSCDKTHTCPPCPAPEAAGGPSVFLFPPKPK |
| | | | DTLMISRTPEVTCVVVSVSHEDPEVKFNWYVDGVEVHNAKTKPREEQYNS |
| | | | TYRVVSVLTVLHQDWLNGKEYKCKVSNKALPAPIEKTISKAKGQPREPQV |
| | | | YVYPPSRDELTKNQVSLTCLVKGFYPSDIAVEWESNGQPENNYKTTPPVLD |
| | | | SDGSFALVSKLTVDKSRWQQGNVFSCSVMHEALHNHYTQKSLSLSPG |
| 282 | 21490 | full AA | DIQMTQSPSSLSASVGDRVTITCRASQDVNTAVAWYQQKPGKAPKLLIYSA |
| | | | SFLYSGVPSRFSGSRSGTDFTLTISSLQPEDFATYYCQQHYTTPPTFGQGTKV |
| | | | EIKGGSGGGSGGGSGGGSGGGSGEVQLVESGGGLVQPGGSLRLSCAASGF |
| | | | NIKDTYIHWVRQAPGKGLEWVARIYPTNGYTRYADSVKGRFTISADTSKN |
| | | | TAYLQMNSLRAEDTAVYYCSRWGGDGFYAMDYWGQGTLVTVSSEPKSS |
| | | | DKTHTCPPCPAPEAAGGPSVFLFPPKPKDTLMISRTPEVTCVVVSVSHEDPE |
| | | | VKFNWYVDGVEVHNAKTKPREEQYNSTYRVVSVLTVLHQDWLNGKEYK |
| | | | CKVSNKALPAPIEKTISKAKGQPREPQVYVLPPSRDELTKNQVSLLCLVKGF |
| | | | YPSDIAVEWESNGQPENNYLTWPPVLDSDGSFFLYSKLTVDKSRWQQGNV |
| | | | FSCSVMHEALHNHYTQKSLSLSPG |
| 283 | 22080 | full AA | NPPTFSPALLVVTEGDNATFTCSFSNTSESFHVVWHRESPSGQTDTLAAFPE |
| | | | DRSQPGQDARFRVTQLPNGRDFHMSVVRARRNDSGTYVCGVISLAPKIQIK |
| | | | ESLRAELRVTEEAAAKEAAAKQVQLVESGGGVVQPGRSLRLSCKASGYTF |
| | | | TRSTMHWVRQAPGQGLEWIGYINPSSAYTNYNQKFKDRFTISADKSKSTAF |
| | | | LQMDSLRPEDTGVYFCARPQVHYDYNGFPYWGQGTPVTVSSASTKGPSVF |
| | | | PLAPSSKSTSGGTAALGCLVKDYFPEPVTVSWNSGALTSGVHTFPAVLQSS |
| | | | GLYSLSSVVTVPSSSLGTQTYICNVNHKPSNTKVDKKVEPKSCDKTHTCPP |
| | | | CPAPEAAGGPSVFLFPPKPKDTLMISRTPEVTCVVVSVSHEDPEVKFNWYV |
| | | | DGVEVHNAKTKPREEQYNSTYRVVSVLTVLHQDWLNGKEYKCKVSNKAL |
| | | | PAPIEKTISKAKGQPREPQVYVYPPSRDELTKNQVSLTCLVKGFYPSDIAVE |
| | | | WESNGQPENNYKTTPPVLDSDGSFALVSKLTVDKSRWQQGNVFSCSVMH |
| | | | EALHNHYTQKSLSLSPG |
| 284 | 22082 | full AA | NPPTFSPALLVVTEGDNATFTCSFSNTSESFVLNWYRMSPSNQTDKLAAFPE |
| | | | DRSQPGQDSRFRVTQLPNGRDFHMSVVRARRNDSGTYLCGAISLAPKAQIK |
| | | | ESLRAELRVTEEAAAKEAAAKQVQLVESGGGVVQPGRSLRLSCKASGYTF |
| | | | TRSTMHWVRQAPGQGLEWIGYINPSSAYTNYNQKFKDRFTISADKSKSTAF |
| | | | LQMDSLRPEDTGVYFCARPQVHYDYNGFPYWGQGTPVTVSSASTKGPSVF |
| | | | PLAPSSKSTSGGTAALGCLVKDYFPEPVTVSWNSGALTSGVHTFPAVLQSS |
| | | | GLYSLSSVVTVPSSSLGTQTYICNVNHKPSNTKVDKKVEPKSCDKTHTCPP |
| | | | CPAPEAAGGPSVFLFPPKPKDTLMISRTPEVTCVVVSVSHEDPEVKFNWYV |
| | | | DGVEVHNAKTKPREEQYNSTYRVVSVLTVLHQDWLNGKEYKCKVSNKAL |
| | | | PAPIEKTISKAKGQPREPQVYVYPPSRDELTKNQVSLTCLVKGFYPSDIAVE |
| | | | WESNGQPENNYKTTPPVLDSDGSFALVSKLTVDKSRWQQGNVFSCSVMH |
| | | | EALHNHYTQKSLSLSPG |
| 285 | 22083 | full AA | NPPTFSPALLVVTEGDNATFTCSFSNTSESFVLNWYRMSPSNQTDKLAAFPE |
| | | | DRSQPGQDSRFRVTQLPNGRDFHMSVVRARRNDSGTYLCGAISLAPKAQIK |
| | | | ESLRAELRVTEMSGRSANAEAAAKQVQLVESGGGVVQPGRSLRLSCKASG |
| | | | YTFTRSTMHWVRQAPGQGLEWIGYINPSSAYTNYNQKFKDRFTISADKSKS |
| | | | TAFLQMDSLRPEDTGVYFCARPQVHYDYNGFPYWGQGTPVTVSSASTKGP |
| | | | SVFPLAPSSKSTSGGTAALGCLVKDYFPEPVTVSWNSGALTSGVHTFPAVL |
| | | | QSSGLYSLSSVVTVPSSSLGTQTYICNVNHKPSNTKVDKKVEPKSCDKTHT |
| | | | CPPCPAPEAAGGPSVFLFPPKPKDTLMISRTPEVTCVVVSVSHEDPEVKFNW |
| | | | YVDGVEVHNAKTKPREEQYNSTYRVVSVLTVLHQDWLNGKEYKCKVSN |
| | | | KALPAPIEKTISKAKGQPREPQVYVYPPSRDELTKNQVSLTCLVKGFYPSDI |
| | | | AVEWESNGQPENNYKTTPPVLDSDGSFALVSKLTVDKSRWQQGNVFSCSV |
| | | | MHEALHNHYTQKSLSLSPG |
| 286 | 22086 | full AA | NPPTFSPALLVVTEGDNATFTCSFSNTSESFVLNWYRMSPSNQTDKLAAFPE |
| | | | DRSQPGQDSRFRVTQLPNGRDFHMSVVRARRNDSGTYLCGAISLAPKAQIK |
| | | | ESLRAELRVTEEAAAKEAAAKMSGRSANAQVQLVESGGGVVQPGRSLRLS |
| | | | CKASGYTFTRSTMHWVRQAPGQGLEWIGYINPSSAYTNYNQKFKDRFTIS |
| | | | ADKSKSTAFLQMDSLRPEDTGVYFCARPQVHYDYNGFPYWGQGTPVTVSS |
| | | | ASTKGPSVFPLAPSSKSTSGGTAALGCLVKDYFPEPVTVSWNSGALTSGVH |
| | | | TFPAVLQSSGLYSLSSVVTVPSSSLGTQTYICNVNHKPSNTKVDKKVEPKSC |
| | | | DKTHTCPPCPAPEAAGGPSVFLFPPKPKDTLMISRTPEVTCVVVSVSHEDPE |
| | | | VKFNWYVDGVEVHNAKTKPREEQYNSTYRVVSVLTVLHQDWLNGKEYK |
| | | | CKVSNKALPAPIEKTISKAKGQPREPQVYVYPPSRDELTKNQVSLTCLVKG |
| | | | FYPSDIAVEWESNGQPENNYKTTPPVLDSDGSFALVSKLTVDKSRWQQGN |
| | | | VFSCSVMHEALHNHYTQKSLSLSPG |
| 287 | 22091 | full AA | AFTVTVPKDLYVVEYGSNMTIECKFPVEKQLDLAALIVYWEMEDKNIIQFV |
| | | | HGEEDLKVQHSSYRQRARLLKDQLSLGNAALQITDVKLQDAGVYRCMISY |
| | | | GGADYKRITVKVNAEAAAKEAAAKDIQMTQSPSSLSASVGDRVTMTCSAS |
| | | | SSVSYMNWYQQKPGKAPKRWIYDSSKLASGVPARFSGSGSGTDYTLTISSL |
| | | | QPEDFATYYCQQWSRNPPTFGGGTKLQITRTVAAPSVFIFPPSDEQLKSGTA |
| | | | SVVCLLNNFYPREAKVQWKVDNALQSGNSQESVTEQDSKDSTYSLSSTLT |
| | | | LSKADYEKHKVYACEVTHQGLSSPVTKSFNRGEC |
| 288 | 22092 | full AA | AFTVTVPKDLYVVEYGSNMTIECKFPVEKQLDLAALQVFWMMEDKNIIQF |
| | | | VHGEEDLKVQHSSYRQRARLLKDQLSLGNAALQITDVKLQDAGVYTCLIA |
| | | | YKGADYKRITVKVNAEAAAKEAAAKDIQMTQSPSSLSASVGDRVTMTCSA |
| | | | SSSVSYMNWYQQKPGKAPKRWIYDSSKLASGVPARFSGSGSGTDYTLTISS |
| | | | LQPEDFATYYCQQWSRNPPTFGGGTKLQITRTVAAPSVFIFPPSDEQLKSGT |
| | | | ASVVCLLNNFYPREAKVQWKVDNALQSGNSQESVTEQDSKDSTYSLSSTL |
| | | | TLSKADYEKHKVYACEVTHQGLSSPVTKSFNRGEC |
| 289 | 22094 | full AA | AFTVTVPKDLYVVEYGSNMTIECKFPVEKQLDLAALIVYWEMEDKNIIQFV |
| | | | HGEEDLKVQHSSYRQRARLLKDQLSLGNAALQITDVKLQDAGVYRCMISY |
| | | | GGADYKRITVKVNAEAAAKMSGRSANADIQMTQSPSSLSASVGDRVTMT |
| | | | CSASSSVSYMNWYQQKPGKAPKRWIYDSSKLASGVPARFSGSGSGTDYTL |
| | | | TISSLQPEDFATYYCQQWSRNPPTFGGGTKLQITRTVAAPSVFIFPPSDEQLK |
| | | | SGTASVVCLLNNFYPREAKVQWKVDNALQSGNSQESVTEQDSKDSTYSLS |
| | | | STLTLSKADYEKHKVYACEVTHQGLSSPVTKSFNRGEC |
| 290 | 22096 | full AA | AFTVTVPKDLYVVEYGSNMTIECKFPVEKQLDLAALIVYWEMEDKNIIQFV |
| | | | HGEEDLKVQHSSYRQRARLLKDQLSLGNAALQITDVKLQDAGVYRCMISY |
| | | | GGADYKRITVKVNAEAAAKEAAAKMSGRSANADIQMTQSPSSLSASVGD |
| | | | RVTMTCSASSSVSYMNWYQQKPGKAPKRWIYDSSKLASGVPARFSGSGSG |
| | | | TDYTLTISSLQPEDFATYYCQQWSRNPPTFGGGTKLQITRTVAAPSVFIFPPS |
| | | | DEQLKSGTASVVCLLNNFYPREAKVQWKVDNALQSGNSQESVTEQDSKD |
| | | | STYSLSSTLTLSKADYEKHKVYACEVTHQGLSSPVTKSFNRGEC |
| 291 | 12985 | full nt | GACATCCAGATGACACAGAGCCCAAGCTCCCTGAGCGCCTCCGTGGGC |
| | | | GATAGGGTGACCATGACATGCTCTGCCTCTAGCTCCGTGAGCTACATGA |
| | | | ACTGGTATCAGCAGAAGCCAGGCAAGGCCCCCAAGCGGTGGATCTACG |
| | | | ACTCTAGCAAGCTGGCCTCCGGAGTGCCCGCCAGATTTTCTGGCAGCGG |
| | | | CTCCGGCACCGACTATACCCTGACAATCTCCTCTCTGCAGCCTGAGGAT |
| | | | TTCGCCACATACTATTGTCAGCAGTGGTCTAGGAATCCCCCTACCTTTG |
| | | | GCGGCGGCACAAAGCTGCAGATCACCCGCACAGTGGCGGCGCCCAGTG |
| | | | TCTTCATTTTTCCCCCTAGCGACGAACAGCTGAAGTCTGGGACAGCCAG |
| | | | TGTGGTCTGTCTGCTGAACAACTTCTACCCTAGAGAGGCTAAAGTGCAG |
| | | | TGGAAGGTCGATAACGCACTGCAGTCCGGAAATTCTCAGGAGAGTGTG |
| | | | ACTGAACAGGACTCAAAAGATAGCACCTATTCCCTGTCAAGCACACTG |
| | | | ACTCTGAGCAAGGCCGACTACGAGAAGCATAAAGTGTATGCTTGTGAA |
| | | | GTCACCCACCAGGGGCTGAGTTCACCAGTCACAAAATCATTCAACAGA |
| | | | GGGGAGTGC |
| 292 | 12989 | full nt | CAGGTGCAGCTGGTGGAGTCTGGCGGCGGCGTGGTGCAGCCCGGCAGA |
| | | | AGCCTGCGGCTGAGCTGCAAGGCCTCTGGCTACACCTTTACAAGGAGCA |
| | | | CCATGCACTGGGTGCGCCAGGCCCCTGGACAGGGCCTGGAGTGGATCG |
| | | | GCTATATCAACCCAAGCTCCGCCTACACAAACTATAATCAGAAGTTCAA |
| | | | GGACCGGTTTACCATCAGCGCCGATAAGTCCAAGTCTACAGCCTTCCTG |
| | | | CAGATGGACTCCCTGCGGCCAGAGGATACAGGCGTGTACTTCTGTGCCA |
| | | | GACCCCAGGTGCACTACGACTATAATGGCTTTCCCTATTGGGGCCAGGG |
| | | | CACCCCTGTGACAGTGTCTAGCGCTAGCACTAAGGGGCCTTCCGTGTTT |
| | | | CCACTGGCTCCCTCTAGTAAATCCACCTCTGGAGGCACAGCTGCACTGG |
| | | | GATGTCTGGTGAAGGATTACTTCCCTGAACCAGTCACAGTGAGTTGGAA |
| | | | CTCAGGGGCTCTGACAAGTGGAGTCCATACTTTTCCCGCAGTGCTGCAG |
| | | | TCAAGCGGACTGTACTCCCTGTCCTCTGTGGTCACCGTGCCTAGTTCAA |
| | | | GCCTGGGCACCCAGACATATATCTGCAACGTGAATCACAAGCCATCAA |
| | | | ATACAAAAGTCGACAAGAAAGTGGAGCCCAAGAGCTGTGATAAAACTC |
| | | | ATACCTGCCCACCTTGTCCGGCGCCAGAGGCTGCAGGAGGACCAAGCG |
| | | | TGTTCCTGTTTCCACCCAAGCCTAAAGACACACTGATGATTTCCCGAAC |
| | | | CCCCGAAGTCACATGCGTGGTCGTGTCTGTGAGTCACGAGGACCCTGAA |
| | | | GTCAAGTTCAACTGGTACGTGGATGGCGTCGAGGTGCATAATGCCAAG |
| | | | ACTAAACCTAGGGAGGAACAGTACAACTCAACCTATCGCGTCGTGAGC |
| | | | GTCCTGACAGTGCTGCACCAGGATTGGCTGAACGGCAAAGAATATAAG |
| | | | TGCAAAGTGAGCAATAAGGCCCTGCCCGCTCCTATCGAGAAAACCATTT |
| | | | CCAAGGCTAAAGGGCAGCCTCGCGAACCACAGGTCTACGTGTATCCTCC |
| | | | AAGCCGGGACGAGCTGACAAAGAACCAGGTCTCCCTGACTTGTCTGGT |
| | | | GAAAGGGTTTTACCCTAGTGATATCGCTGTGGAGTGGGAATCAAATGG |
| | | | ACAGCCAGAGAACAATTATAAGACTACCCCCCCTGTGCTGGACAGTGA |
| | | | TGGGTCATTCGCACTGGTCTCCAAGCTGACAGTGGACAAATCTCGGTGG |
| | | | CAGCAGGGAAATGTCTTTTCATGTAGCGTGATGCATGAAGCACTGCACA |
| | | | ACCATTACACCCAGAAGTCACTGTCACTGTCACCAGGA |
| 293 | 21490 | full nt | GACATCCAGATGACACAGTCTCCTAGCTCCCTGTCTGCCAGCGTGGGCG |
| | | | ACAGGGTGACCATCACATGCAGGGCCAGCCAGGATGTGAACACCGCCG |
| | | | TGGCCTGGTACCAGCAGAAGCCTGGCAAGGCCCCAAAGCTGCTGATCT |
| | | | ACTCCGCCTCTTTCCTGTATAGCGGCGTGCCTTCCCGGTTTAGCGGCTCC |
| | | | AGATCTGGCACCGACTTCACCCTGACAATCTCTAGCCTGCAGCCAGAGG |
| | | | ATTTTGCCACATACTATTGCCAGCAGCACTATACCACACCCCCTACCTTC |
| | | | GGCCAGGGCACAAAGGTGGAGATCAAGGGAGGCTCTGGAGGAGGCAG |
| | | | CGGAGGAGGCTCCGGAGGAGGCTCTGGCGGCGGCAGCGGCGAGGTGCA |
| | | | GCTGGTGGAGTCCGGCGGCGGCCTGGTGCAGCCCGGCGGCTCCCTGCG |
| | | | GCTGTCTTGTGCCGCCAGCGGCTTCAACATCAAGGATACCTACATCCAC |
| | | | TGGGTGCGGCAGGCCCCAGGCAAGGGACTGGAGTGGGTGGCCAGAATC |
| | | | TATCCCACCAATGGCTACACACGGTATGCCGACAGCGTGAAGGGCCGG |
| | | | TTCACCATCTCCGCCGATACCTCTAAGAACACAGCCTACCTGCAGATGA |
| | | | ATAGCCTGAGGGCCGAGGACACAGCCGTGTACTATTGTTCCCGCTGGGG |
| | | | AGGCGACGGCTTCTACGCAATGGATTATTGGGGCCAGGGCACCCTGGT |
| | | | GACAGTGTCCTCTGAGCCTAAGAGCTCCGATAAGACCCACACATGCCCA |
| | | | CCCTGTCCGGCGCCAGAGGCCGCCGGAGGACCAAGCGTGTTCCTGTTTC |
| | | | CACCCAAGCCCAAGGACACCCTGATGATCTCCCGGACCCCAGAGGTGA |
| | | | CATGCGTGGTGGTGAGCGTGTCCCACGAGGACCCCGAGGTGAAGTTTA |
| | | | ACTGGTACGTGGATGGCGTGGAGGTGCACAATGCCAAGACAAAGCCCC |
| | | | GGGAGGAGCAGTACAATTCTACCTATAGAGTGGTGAGCGTGCTGACAG |
| | | | TGCTGCACCAGGATTGGCTGAACGGCAAGGAGTATAAGTGTAAGGTGA |
| | | | GCAATAAGGCCCTGCCAGCCCCCATCGAGAAGACCATCTCCAAGGCCA |
| | | | AGGGCCAGCCTCGCGAACCACAGGTCTACGTGCTGCCCCCTAGCCGCG |
| | | | ACGAACTGACTAAAAATCAGGTCTCTCTGCTGTGTCTGGTCAAAGGATT |
| | | | CTACCCTTCCGACATCGCCGTGGAGTGGGAAAGTAACGGCCAGCCCGA |
| | | | GAACAATTACCTGACCTGGCCCCCTGTGCTGGACTCTGATGGGAGTTTC |
| | | | TTTCTGTATTCAAAGCTGACAGTCGATAAAAGCCGGTGGCAGCAGGGC |
| | | | AATGTGTTCAGCTGCTCCGTCATGCACGAAGCACTGCACAACCATTACA |
| | | | CTCAGAAGTCCCTGTCCCTGTCACCTGGC |
| 294 | 22080 | full nt | AACCCCCCTACCTTTTCCCCAGCCCTGCTGGTGGTGACAGAGGGCGACA |
| | | | ACGCCACCTTCACATGCTCTTTTAGCAATACATCCGAGTCTTTCCACGTG |
| | | | GTGTGGCACCGGGAGAGCCCATCCGGACAGACCGATACACTGGCCGCC |
| | | | TTTCCAGAGGACAGATCTCAGCCAGGACAGGATGCAAGGTTCCGCGTG |
| | | | ACCCAGCTGCCAAACGGCAGGGACTTTCACATGTCTGTGGTGCGCGCCC |
| | | | GGAGAAATGATAGCGGCACATACGTGTGCGGCGTGATCTCCCTGGCCC |
| | | | CTAAGATCCAGATCAAGGAGAGCCTGAGGGCAGAGCTGAGGGTGACCG |
| | | | AGGAGGCTGCCGCCAAGGAGGCTGCCGCCAAGCAGGTGCAGCTGGTGG |
| | | | AGTCTGGAGGAGGAGTGGTGCAGCCCGGCAGAAGCCTGCGGCTGAGCT |
| | | | GTAAGGCCTCCGGCTACACCTTCACACGGAGCACCATGCACTGGGTGA |
| | | | GACAGGCCCCCGGACAGGGACTGGAGTGGATCGGCTATATCAATCCTA |
| | | | GCTCCGCCTACACAAACTATAATCAGAAGTTTAAGGACCGGTTTACCAT |
| | | | CAGCGCCGATAAGTCCAAGTCTACAGCCTTCCTGCAGATGGACTCCCTG |
| | | | CGGCCAGAGGATACAGGCGTGTACTTCTGTGCCAGACCCCAGGTGCACT |
| | | | ACGACTATAACGGCTTTCCCTATTGGGGCCAGGGCACCCCTGTGACAGT |
| | | | GTCTAGCGCTAGCACTAAGGGGCCTTCCGTGTTTCCACTGGCTCCCTCT |
| | | | AGTAAATCCACCTCTGGAGGCACAGCTGCACTGGGATGTCTGGTGAAG |
| | | | GATTACTTCCCTGAACCAGTCACAGTGAGTTGGAACTCAGGGGCTCTGA |
| | | | CAAGTGGAGTCCATACTTTTCCCGCAGTGCTGCAGTCAAGCGGACTGTA |
| | | | CTCCCTGTCCTCTGTGGTCACCGTGCCTAGTTCAAGCCTGGGCACCCAG |
| | | | ACATATATCTGCAACGTGAATCACAAGCCATCAAATACAAAAGTCGAC |
| | | | AAGAAAGTGGAGCCCAAGAGCTGTGATAAAACTCATACCTGCCCACCT |
| | | | TGTCCGGCGCCAGAGGCTGCAGGAGGACCAAGCGTGTTCCTGTTTCCAC |
| | | | CCAAGCCTAAAGACACACTGATGATTTCCCGAACCCCCGAAGTCACATG |
| | | | CGTGGTCGTGTCTGTGAGTCACGAGGACCCTGAAGTCAAGTTCAACTGG |
| | | | TACGTGGATGGCGTCGAGGTGCATAATGCCAAGACTAAACCTAGGGAG |
| | | | GAACAGTACAACTCAACCTATCGCGTCGTGAGCGTCCTGACAGTGCTGC |
| | | | ACCAGGATTGGCTGAACGGCAAAGAATATAAGTGCAAAGTGAGCAATA |
| | | | AGGCCCTGCCCGCTCCTATCGAGAAAACCATTTCCAAGGCTAAAGGGC |
| | | | AGCCTCGCGAACCACAGGTCTACGTGTATCCTCCAAGCCGGGACGAGCT |
| | | | GACAAAGAACCAGGTCTCCCTGACTTGTCTGGTGAAAGGGTTTTACCCT |
| | | | AGTGATATCGCTGTGGAGTGGGAATCAAATGGACAGCCAGAGAACAAT |
| | | | TATAAGACTACCCCCCCTGTGCTGGACAGTGATGGGTCATTCGCACTGG |
| | | | TCTCCAAGCTGACAGTGGACAAATCTCGGTGGCAGCAGGGAAATGTCTT |
| | | | TTCATGTAGCGTGATGCATGAAGCACTGCACAACCATTACACCCAGAAG |
| | | | TCACTGTCACTGTCACCAGGA |
| 295 | 22082 | full nt | AATCCCCCTACCTTTAGCCCAGCCCTGCTGGTGGTGACAGAGGGCGACA |
| | | | ACGCCACCTTCACATGCTCTTTTAGCAACACCTCCGAGTCTTTCGTGCTG |
| | | | AATTGGTACAGAATGAGCCCATCCAACCAGACAGATAAGCTGGCCGCC |
| | | | TTTCCAGAGGACAGATCTCAGCCCGGCCAGGATAGCAGGTTCCGCGTG |
| | | | ACCCAGCTGCCCAATGGCAGGGACTTTCACATGTCCGTGGTGCGCGCCC |
| | | | GGAGAAACGATTCTGGCACATATCTGTGCGGAGCCATCAGCCTGGCCCC |
| | | | TAAGGCACAGATCAAGGAGTCCCTGAGGGCAGAGCTGAGGGTGACAGA |
| | | | GGAGGCTGCCGCCAAGGAGGCTGCCGCCAAGCAGGTGCAGCTGGTGGA |
| | | | GTCCGGAGGAGGAGTGGTGCAGCCCGGCAGAAGCCTGCGGCTGAGCTG |
| | | | TAAGGCCTCCGGCTACACCTTCACACGGTCTACCATGCACTGGGTGAGA |
| | | | CAGGCCCCCGGACAGGGACTGGAGTGGATCGGCTATATCAATCCTAGC |
| | | | TCCGCCTACACAAACTATAATCAGAAGTTTAAGGACCGGTTTACCATCA |
| | | | GCGCCGATAAGTCCAAGTCTACAGCCTTCCTGCAGATGGACTCCCTGCG |
| | | | GCCAGAGGATACAGGCGTGTACTTCTGTGCCAGACCCCAGGTGCACTAC |
| | | | GACTATAACGGCTTTCCCTATTGGGGCCAGGGCACCCCTGTGACAGTGT |
| | | | CTAGCGCTAGCACTAAGGGGCCTTCCGTGTTTCCACTGGCTCCCTCTAG |
| | | | TAAATCCACCTCTGGAGGCACAGCTGCACTGGGATGTCTGGTGAAGGAT |
| | | | TACTTCCCTGAACCAGTCACAGTGAGTTGGAACTCAGGGGCTCTGACAA |
| | | | GTGGAGTCCATACTTTTCCCGCAGTGCTGCAGTCAAGCGGACTGTACTC |
| | | | CCTGTCCTCTGTGGTCACCGTGCCTAGTTCAAGCCTGGGCACCCAGACA |
| | | | TATATCTGCAACGTGAATCACAAGCCATCAAATACAAAAGTCGACAAG |
| | | | AAAGTGGAGCCCAAGAGCTGTGATAAAACTCATACCTGCCCACCTTGTC |
| | | | CGGCGCCAGAGGCTGCAGGAGGACCAAGCGTGTTCCTGTTTCCACCCA |
| | | | AGCCTAAAGACACACTGATGATTTCCCGAACCCCCGAAGTCACATGCGT |
| | | | GGTCGTGTCTGTGAGTCACGAGGACCCTGAAGTCAAGTTCAACTGGTAC |
| | | | GTGGATGGCGTCGAGGTGCATAATGCCAAGACTAAACCTAGGGAGGAA |
| | | | CAGTACAACTCAACCTATCGCGTCGTGAGCGTCCTGACAGTGCTGCACC |
| | | | AGGATTGGCTGAACGGCAAAGAATATAAGTGCAAAGTGAGCAATAAGG |
| | | | CCCTGCCCGCTCCTATCGAGAAAACCATTTCCAAGGCTAAAGGGCAGCC |
| | | | TCGCGAACCACAGGTCTACGTGTATCCTCCAAGCCGGGACGAGCTGAC |
| | | | AAAGAACCAGGTCTCCCTGACTTGTCTGGTGAAAGGGTTTTACCCTAGT |
| | | | GATATCGCTGTGGAGTGGGAATCAAATGGACAGCCAGAGAACAATTAT |
| | | | AAGACTACCCCCCCTGTGCTGGACAGTGATGGGTCATTCGCACTGGTCT |
| | | | CCAAGCTGACAGTGGACAAATCTCGGTGGCAGCAGGGAAATGTCTTTTC |
| | | | ATGTAGCGTGATGCATGAAGCACTGCACAACCATTACACCCAGAAGTC |
| | | | ACTGTCACTGTCACCAGGA |
| 296 | 22083 | full nt | AATCCCCCTACCTTTTCTCCAGCCCTGCTGGTGGTGACAGAGGGCGACA |
| | | | ACGCCACCTTCACATGCTCTTTTAGCAACACCTCCGAGTCTTTCGTGCTG |
| | | | AATTGGTACAGAATGAGCCCATCCAACCAGACAGATAAGCTGGCCGCC |
| | | | TTTCCAGAGGACAGATCCCAGCCCGGCCAGGATTCTAGGTTCCGCGTGA |
| | | | CCCAGCTGCCCAATGGCAGGGACTTTCACATGAGCGTGGTGCGCGCCCG |
| | | | GAGAAACGATTCCGGCACATATCTGTGCGGAGCCATCTCTCTGGCCCCT |
| | | | AAGGCCCAGATCAAGGAGTCCCTGAGGGCAGAGCTGAGGGTGACAGAG |
| | | | ATGTCTGGCCGGAGCGCCAATGCCGAGGCTGCCGCCAAGCAGGTGCAG |
| | | | CTGGTGGAGAGCGGAGGAGGAGTGGTGCAGCCCGGCAGAAGCCTGCGG |
| | | | CTGAGCTGTAAGGCCAGCGGCTACACCTTCACACGGTCCACCATGCACT |
| | | | GGGTGAGACAGGCCCCCGGACAGGGACTGGAGTGGATCGGCTATATCA |
| | | | ACCCTAGCTCCGCCTACACAAACTATAATCAGAAGTTTAAGGACCGGTT |
| | | | TACCATCAGCGCCGATAAGTCCAAGTCTACAGCCTTCCTGCAGATGGAC |
| | | | TCCCTGCGGCCAGAGGATACAGGCGTGTACTTCTGTGCCAGACCCCAGG |
| | | | TGCACTACGACTATAACGGCTTTCCCTATTGGGGCCAGGGCACCCCTGT |
| | | | GACAGTGTCTAGCGCTAGCACTAAGGGGCCTTCCGTGTTTCCACTGGCT |
| | | | CCCTCTAGTAAATCCACCTCTGGAGGCACAGCTGCACTGGGATGTCTGG |
| | | | TGAAGGATTACTTCCCTGAACCAGTCACAGTGAGTTGGAACTCAGGGGC |
| | | | TCTGACAAGTGGAGTCCATACTTTTCCCGCAGTGCTGCAGTCAAGCGGA |
| | | | CTGTACTCCCTGTCCTCTGTGGTCACCGTGCCTAGTTCAAGCCTGGGCAC |
| | | | CCAGACATATATCTGCAACGTGAATCACAAGCCATCAAATACAAAAGT |
| | | | CGACAAGAAAGTGGAGCCCAAGAGCTGTGATAAAACTCATACCTGCCC |
| | | | ACCTTGTCCGGCGCCAGAGGCTGCAGGAGGACCAAGCGTGTTCCTGTTT |
| | | | CCACCCAAGCCTAAAGACACACTGATGATTTCCCGAACCCCCGAAGTCA |
| | | | CATGCGTGGTCGTGTCTGTGAGTCACGAGGACCCTGAAGTCAAGTTCAA |
| | | | CTGGTACGTGGATGGCGTCGAGGTGCATAATGCCAAGACTAAACCTAG |
| | | | GGAGGAACAGTACAACTCAACCTATCGCGTCGTGAGCGTCCTGACAGT |
| | | | GCTGCACCAGGATTGGCTGAACGGCAAAGAATATAAGTGCAAAGTGAG |
| | | | CAATAAGGCCCTGCCCGCTCCTATCGAGAAAACCATTTCCAAGGCTAAA |
| | | | GGGCAGCCTCGCGAACCACAGGTCTACGTGTATCCTCCAAGCCGGGAC |
| | | | GAGCTGACAAAGAACCAGGTCTCCCTGACTTGTCTGGTGAAAGGGTTTT |
| | | | ACCCTAGTGATATCGCTGTGGAGTGGGAATCAAATGGACAGCCAGAGA |
| | | | ACAATTATAAGACTACCCCCCCTGTGCTGGACAGTGATGGGTCATTCGC |
| | | | ACTGGTCTCCAAGCTGACAGTGGACAAATCTCGGTGGCAGCAGGGAAA |
| | | | TGTCTTTTCATGTAGCGTGATGCATGAAGCACTGCACAACCATTACACC |
| | | | CAGAAGTCACTGTCACTGTCACCAGGA |
| 297 | 22086 | full nt | AATCCCCCTACCTTTTCTCCAGCCCTGCTGGTGGTGACAGAGGGCGACA |
| | | | ACGCCACCTTCACATGCTCTTTTAGCAACACCTCCGAGTCTTTCGTGCTG |
| | | | AATTGGTACAGAATGAGCCCATCCAACCAGACAGATAAGCTGGCCGCC |
| | | | TTTCCAGAGGACAGATCCCAGCCCGGCCAGGATTCTAGGTTCCGCGTGA |
| | | | CCCAGCTGCCCAATGGCAGGGACTTTCACATGAGCGTGGTGCGCGCCCG |
| | | | GAGAAACGATTCCGGCACATATCTGTGCGGAGCCATCTCTCTGGCCCCT |
| | | | AAGGCCCAGATCAAGGAGTCCCTGAGGGCAGAGCTGAGGGTGACAGAG |
| | | | GAGGCTGCCGCCAAGGAGGCTGCCGCCAAGATGTCTGGCCGGAGCGCC |
| | | | AATGCCCAGGTGCAGCTGGTGGAGAGCGGAGGAGGAGTGGTGCAGCCC |
| | | | GGCAGAAGCCTGCGGCTGAGCTGTAAGGCCAGCGGCTACACCTTCACA |
| | | | CGGTCCACCATGCACTGGGTGAGACAGGCCCCCGGACAGGGACTGGAG |
| | | | TGGATCGGCTATATCAACCCTAGCTCCGCCTACACAAACTATAATCAGA |
| | | | AGTTTAAGGACCGGTTTACCATCAGCGCCGATAAGTCCAAGTCTACAGC |
| | | | CTTCCTGCAGATGGACTCCCTGCGGCCAGAGGATACAGGCGTGTACTTC |
| | | | TGTGCCAGACCCCAGGTGCACTACGACTATAACGGCTTTCCCTATTGGG |
| | | | GCCAGGGCACCCCTGTGACAGTGTCTAGCGCTAGCACTAAGGGGCCTTC |
| | | | CGTGTTTCCACTGGCTCCCTCTAGTAAATCCACCTCTGGAGGCACAGCT |
| | | | GCACTGGGATGTCTGGTGAAGGATTACTTCCCTGAACCAGTCACAGTGA |
| | | | GTTGGAACTCAGGGGCTCTGACAAGTGGAGTCCATACTTTTCCCGCAGT |
| | | | GCTGCAGTCAAGCGGACTGTACTCCCTGTCCTCTGTGGTCACCGTGCCT |
| | | | AGTTCAAGCCTGGGCACCCAGACATATATCTGCAACGTGAATCACAAG |
| | | | CCATCAAATACAAAAGTCGACAAGAAAGTGGAGCCCAAGAGCTGTGAT |
| | | | AAAACTCATACCTGCCCACCTTGTCCGGCGCCAGAGGCTGCAGGAGGA |
| | | | CCAAGCGTGTTCCTGTTTCCACCCAAGCCTAAAGACACACTGATGATTT |
| | | | CCCGAACCCCCGAAGTCACATGCGTGGTCGTGTCTGTGAGTCACGAGGA |
| | | | CCCTGAAGTCAAGTTCAACTGGTACGTGGATGGCGTCGAGGTGCATAAT |
| | | | GCCAAGACTAAACCTAGGGAGGAACAGTACAACTCAACCTATCGCGTC |
| | | | GTGAGCGTCCTGACAGTGCTGCACCAGGATTGGCTGAACGGCAAAGAA |
| | | | TATAAGTGCAAAGTGAGCAATAAGGCCCTGCCCGCTCCTATCGAGAAA |
| | | | ACCATTTCCAAGGCTAAAGGGCAGCCTCGCGAACCACAGGTCTACGTGT |
| | | | ATCCTCCAAGCCGGGACGAGCTGACAAAGAACCAGGTCTCCCTGACTT |
| | | | GTCTGGTGAAAGGGTTTTACCCTAGTGATATCGCTGTGGAGTGGGAATC |
| | | | AAATGGACAGCCAGAGAACAATTATAAGACTACCCCCCCTGTGCTGGA |
| | | | CAGTGATGGGTCATTCGCACTGGTCTCCAAGCTGACAGTGGACAAATCT |
| | | | CGGTGGCAGCAGGGAAATGTCTTTTCATGTAGCGTGATGCATGAAGCAC |
| | | | TGCACAACCATTACACCCAGAAGTCACTGTCACTGTCACCAGGA |
| 298 | 22091 | full nt | GCCTTCACCGTGACAGTGCCAAAGGATCTGTACGTGGTGGAGTATGGCA |
| | | | GCAACATGACAATCGAGTGCAAGTTCCCAGTGGAGAAGCAGCTGGACC |
| | | | TGGCCGCCCTGATCGTGTACTGGGAGATGGAGGATAAGAATATCATCC |
| | | | AGTTTGTGCACGGCGAGGAGGACCTGAAGGTGCAGCACAGCTCCTATC |
| | | | GGCAGAGAGCCAGGCTGCTGAAGGATCAGCTGAGCCTGGGCAACGCCG |
| | | | CCCTGCAGATCACCGACGTGAAGCTGCAGGATGCCGGGGTGTACAGAT |
| | | | GCATGATCTCCTACGGCGGAGCCGACTATAAGCGGATCACCGTGAAGG |
| | | | TGAACGCCGAGGCTGCCGCCAAGGAGGCTGCCGCCAAGGATATCCAGA |
| | | | TGACACAGTCCCCTTCTAGCCTGTCTGCCAGCGTGGGCGACAGGGTGAC |
| | | | CATGACATGTTCCGCCTCCTCTAGCGTGTCTTACATGAACTGGTATCAG |
| | | | CAGAAGCCAGGCAAGGCCCCCAAGAGATGGATCTACGACTCCTCTAAG |
| | | | CTGGCCTCTGGCGTGCCCGCCAGGTTCTCCGGCTCTGGCAGCGGCACCG |
| | | | ATTATACCCTGACAATCAGCTCCCTGCAGCCTGAGGACTTCGCCACATA |
| | | | CTATTGTCAGCAGTGGTCCCGCAATCCCCCTACCTTTGGCGGCGGCACA |
| | | | AAGCTGCAGATCACCCGGACAGTGGCGGCGCCCAGTGTCTTCATTTTTC |
| | | | CCCCTAGCGACGAACAGCTGAAGTCTGGGACAGCCAGTGTGGTCTGTCT |
| | | | GCTGAACAACTTCTACCCTAGAGAGGCTAAAGTGCAGTGGAAGGTCGA |
| | | | TAACGCACTGCAGTCCGGAAATTCTCAGGAGAGTGTGACTGAACAGGA |
| | | | CTCAAAAGATAGCACCTATTCCCTGTCAAGCACACTGACTCTGAGCAAG |
| | | | GCCGACTACGAGAAGCATAAAGTGTATGCTTGTGAAGTCACCCACCAG |
| | | | GGGCTGAGTTCACCAGTCACAAAATCATTCAACAGAGGGGAGTGC |
| 299 | 22092 | full nt | GCCTTCACCGTGACAGTGCCAAAGGATCTGTACGTGGTGGAGTATGGCA |
| | | | GCAACATGACCATCGAGTGCAAGTTCCCAGTGGAGAAGCAGCTGGACC |
| | | | TGGCCGCCCTGCAGGTGTTCTGGATGATGGAGGATAAGAATATCATCCA |
| | | | GTTTGTGCACGGCGAGGAGGACCTGAAGGTGCAGCACAGCTCCTACCG |
| | | | GCAGAGAGCCAGGCTGCTGAAGGATCAGCTGTCTCTGGGCAACGCCGC |
| | | | CCTGCAGATCACCGACGTGAAGCTGCAGGATGCCGGGGTGTACACATG |
| | | | CCTGATCGCCTACAAGGGAGCCGACTATAAGCGGATCACCGTGAAGGT |
| | | | GAACGCCGAGGCTGCCGCCAAGGAGGCTGCCGCCAAGGATATCCAGAT |
| | | | GACACAGTCCCCTTCTAGCCTGTCTGCCAGCGTGGGCGACAGAGTGACC |
| | | | ATGACATGTTCCGCCTCCTCTAGCGTGTCTTACATGAACTGGTATCAGC |
| | | | AGAAGCCAGGCAAGGCCCCCAAGCGGTGGATCTACGACTCCTCTAAGC |
| | | | TGGCCAGCGGCGTGCCCGCCCGGTTTTCCGGCTCTGGCAGCGGCACCGA |
| | | | TTATACCCTGACAATCAGCTCCCTGCAGCCTGAGGACTTCGCCACATAC |
| | | | TATTGTCAGCAGTGGTCCAGAAATCCCCCTACCTTTGGCGGCGGCACAA |
| | | | AGCTGCAGATCACCAGGACAGTGGCGGCGCCCAGTGTCTTCATTTTTCC |
| | | | CCCTAGCGACGAACAGCTGAAGTCTGGGACAGCCAGTGTGGTCTGTCTG |
| | | | CTGAACAACTTCTACCCTAGAGAGGCTAAAGTGCAGTGGAAGGTCGAT |
| | | | AACGCACTGCAGTCCGGAAATTCTCAGGAGAGTGTGACTGAACAGGAC |
| | | | TCAAAAGATAGCACCTATTCCCTGTCAAGCACACTGACTCTGAGCAAGG |
| | | | CCGACTACGAGAAGCATAAAGTGTATGCTTGTGAAGTCACCCACCAGG |
| | | | GGCTGAGTTCACCAGTCACAAAATCATTCAACAGAGGGGAGTGC |
| 300 | 22094 | full nt | GCCTTCACCGTGACAGTGCCAAAGGATCTGTACGTGGTGGAGTATGGCA |
| | | | GCAACATGACAATCGAGTGCAAGTTCCCAGTGGAGAAGCAGCTGGACC |
| | | | TGGCCGCCCTGATCGTGTACTGGGAGATGGAGGATAAGAATATCATCC |
| | | | AGTTTGTGCACGGCGAGGAGGACCTGAAGGTGCAGCACAGCTCCTATC |
| | | | GGCAGAGAGCCAGGCTGCTGAAGGATCAGCTGTCTCTGGGCAACGCCG |
| | | | CCCTGCAGATCACCGACGTGAAGCTGCAGGATGCCGGGGTGTACAGAT |
| | | | GCATGATCAGCTACGGCGGAGCCGACTATAAGCGGATCACCGTGAAGG |
| | | | TGAACGCCGAGGCTGCCGCCAAGATGAGCGGCAGAAGCGCCAACGCCG |
| | | | ATATCCAGATGACACAGTCCCCTTCTAGCCTGTCTGCCAGCGTGGGCGA |
| | | | CAGGGTGACCATGACATGTAGCGCCTCCTCTAGCGTGTCCTACATGAAC |
| | | | TGGTATCAGCAGAAGCCAGGCAAGGCCCCCAAGAGATGGATCTACGAC |
| | | | TCCTCTAAGCTGGCCTCCGGCGTGCCCGCCAGGTTCTCCGGCTCTGGCA |
| | | | GCGGCACCGATTATACCCTGACAATCAGCTCCCTGCAGCCTGAGGACTT |
| | | | CGCCACATACTATTGTCAGCAGTGGTCTCGCAATCCCCCTACCTTTGGC |
| | | | GGCGGCACAAAGCTGCAGATCACCCGGACAGTGGCGGCGCCCAGTGTC |
| | | | TTCATTTTTCCCCCTAGCGACGAACAGCTGAAGTCTGGGACAGCCAGTG |
| | | | TGGTCTGTCTGCTGAACAACTTCTACCCTAGAGAGGCTAAAGTGCAGTG |
| | | | GAAGGTCGATAACGCACTGCAGTCCGGAAATTCTCAGGAGAGTGTGAC |
| | | | TGAACAGGACTCAAAAGATAGCACCTATTCCCTGTCAAGCACACTGACT |
| | | | CTGAGCAAGGCCGACTACGAGAAGCATAAAGTGTATGCTTGTGAAGTC |
| | | | ACCCACCAGGGGCTGAGTTCACCAGTCACAAAATCATTCAACAGAGGG |
| | | | GAGTGC |
| 301 | 22096 | full nt | GCCTTCACCGTGACAGTGCCAAAGGATCTGTACGTGGTGGAGTATGGCA |
| | | | GCAACATGACAATCGAGTGCAAGTTCCCAGTGGAGAAGCAGCTGGACC |
| | | | TGGCCGCCCTGATCGTGTACTGGGAGATGGAGGATAAGAATATCATCC |
| | | | AGTTTGTGCACGGCGAGGAGGACCTGAAGGTGCAGCACAGCTCCTATC |
| | | | GGCAGAGAGCCAGGCTGCTGAAGGATCAGCTGTCTCTGGGCAACGCCG |
| | | | CCCTGCAGATCACCGACGTGAAGCTGCAGGATGCCGGGGTGTACAGAT |
| | | | GCATGATCAGCTACGGCGGAGCCGACTATAAGCGGATCACAGTGAAGG |
| | | | TGAACGCCGAGGCTGCCGCCAAGGAGGCTGCCGCCAAGATGAGCGGCA |
| | | | GAAGCGCCAACGCCGATATCCAGATGACCCAGTCCCCTTCTAGCCTGTC |
| | | | TGCCAGCGTGGGCGACAGGGTGACCATGACATGTAGCGCCTCCTCTAGC |
| | | | GTGTCCTACATGAACTGGTATCAGCAGAAGCCAGGCAAGGCCCCCAAG |
| | | | AGATGGATCTACGACTCCTCTAAGCTGGCCTCCGGCGTGCCCGCCAGGT |
| | | | TCTCCGGCTCTGGCAGCGGCACCGATTATACCCTGACAATCAGCTCCCT |
| | | | GCAGCCTGAGGACTTCGCCACATACTATTGTCAGCAGTGGTCTCGCAAT |
| | | | CCCCCTACCTTTGGCGGCGGCACAAAGCTGCAGATCACCCGGACAGTG |
| | | | GCGGCGCCCAGTGTCTTCATTTTTCCCCCTAGCGACGAACAGCTGAAGT |
| | | | CTGGGACAGCCAGTGTGGTCTGTCTGCTGAACAACTTCTACCCTAGAGA |
| | | | GGCTAAAGTGCAGTGGAAGGTCGATAACGCACTGCAGTCCGGAAATTC |
| | | | TCAGGAGAGTGTGACTGAACAGGACTCAAAAGATAGCACCTATTCCCT |
| | | | GTCAAGCACACTGACTCTGAGCAAGGCCGACTACGAGAAGCATAAAGT |
| | | | GTATGCTTGTGAAGTCACCCACCAGGGGCTGAGTTCACCAGTCACAAAA |
| | | | TCATTCAACAGAGGGGAGTGC |
| 302 | 23571 | full AA | EPKSSDKTHTCPPCPAPEAAGGPSVFLFPPKPKDTLMISRTPEVTCVVVSVS |
| | | | HEDPEVKFNWYVDGVEVHNAKTKPREEQYNSTYRVVSVLTVLHQDWLN |
| | | | GKEYKCKVSNKALPAPIEKTISKAKGQPREPQVYVLPPSRDELTKNQVSLL |
| | | | CLVKGFYPSDIAVEWESNGQPENNYLTWPPVLDSDGSFFLYSKLTVDKSR |
| | | | WQQGNVFSCSVMHEALHNHYTQKSLSLSPGGGGGSGGGGSMSGRSANAG |
| | | | GGGSGGGGSQVQLVESGGGVVQPGRSLRLSCAASGFTFSSYGMHWVRQA |
| | | | PGKGLEWVAFIRYDGSNKYYADSVKGRFTISRDNSKNTLYLQMNSLRAED |
| | | | TAVYYCKTHGSHDNWGQGTMVTVSSGGGGSGGGSGGGSGGGGSGGGGS |
| | | | QSVLTQPPSVSGAPGQRVTISCSGSRSNIGSNTVKWYQQLPGTAPKLLIYYN |
| | | | DQRPSGVPDRFSGSKSGTSASLAITGLQAEDEADYYCQSYDRYTHPALLFG |
| | | | TGTKVTVL |
| 303 | 24219 | full AA | EPKSSDKTHTCPPCPAPEAAGGPSVFLFPPKPKDTLMISRTPEVTCVVVSVS |
| | | | HEDPEVKFNWYVDGVEVHNAKTKPREEQYNSTYRVVSVLTVLHQDWLN |
| | | | GKEYKCKVSNKALPAPIEKTISKAKGQPREPQVYVLPPSRDELTKNQVSLL |
| | | | CLVKGFYPSDIAVEWESNGQPENNYLTWPPVLDSDGSFFLYSKLTVDKSR |
| | | | WQQGNVFSCSVMHEALHNHYTQKSLSLSPGGGGGSGGGGSMSGRSANAG |
| | | | GGGSQVQLVESGGGVVQPGRSLRLSCAASGFTFSSYGMHWVRQAPGKGL |
| | | | EWVAFIRYDGSNKYYADSVKGRFTISRDNSKNTLYLQMNSLRAEDTAVYY |
| | | | CKTHGSHDNWGQGTMVTVSSGGGGSMSGRSANAGGGGSGGGGSQSVLT |
| | | | QPPSVSGAPGQRVTISCSGSRSNIGSNTVKWYQQLPGTAPKLLIYYNDQRPS |
| | | | GVPDRFSGSKSGTSASLAITGLQAEDEADYYCQSYDRYTHPALLFGTGTKV |
| | | | TVL |
| 304 | 24221 | full AA | EPKSSDKTHTCPPCPAPEAAGGPSVFLFPPKPKDTLMISRTPEVTCVVVSVS |
| | | | HEDPEVKFNWYVDGVEVHNAKTKPREEQYNSTYRVVSVLTVLHQDWLN |
| | | | GKEYKCKVSNKALPAPIEKTISKAKGQPREPQVYVLPPSRDELTKNQVSLL |
| | | | CLVKGFYPSDIAVEWESNGQPENNYLTWPPVLDSDGSFFLYSKLTVDKSR |
| | | | WQQGNVFSCSVMHEALHNHYTQKSLSLSPGGGGGSMSGRSANAGGGGSQ |
| | | | VQLVESGGGVVQPGRSLRLSCAASGFTFSSYGMHWVRQAPGKGLEWVAFI |
| | | | RYDGSNKYYADSVKGRFTISRDNSKNTLYLQMNSLRAEDTAVYYCKTHGS |
| | | | HDNWGQGTMVTVSSGGGGSMSGRSANAGGGGSGGGGSQSVLTQPPSVSG |
| | | | APGQRVTISCSGSRSNIGSNTVKWYQQLPGTAPKLLIYYNDQRPSGVPDRFS |
| | | | GSKSGTSASLAITGLQAEDEADYYCQSYDRYTHPALLFGTGTKVTVL |
| 305 | 24222 | full AA | EPKSSDKTHTCPPCPAPEAAGGPSVFLFPPKPKDTLMISRTPEVTCVVVSVS |
| | | | HEDPEVKFNWYVDGVEVHNAKTKPREEQYNSTYRVVSVLTVLHQDWLN |
| | | | GKEYKCKVSNKALPAPIEKTISKAKGQPREPQVYVLPPSRDELTKNQVSLL |
| | | | CLVKGFYPSDIAVEWESNGQPENNYLTWPPVLDSDGSFFLYSKLTVDKSR |
| | | | WQQGNVFSCSVMHEALHNHYTQKSLSLSPGGGSMSGRSANAGGSQVQLV |
| | | | ESGGGVVQPGRSLRLSCAASGFTFSSYGMHWVRQAPGKGLEWVAFIRYDG |
| | | | SNKYYADSVKGRFTISRDNSKNTLYLQMNSLRAEDTAVYYCKTHGSHDN |
| | | | WGQGTMVTVSSGGGGSMSGRSANAGGGGSGGGGSQSVLTQPPSVSGAPG |
| | | | QRVTISCSGSRSNIGSNTVKWYQQLPGTAPKLLIYYNDQRPSGVPDRFSGSK |
| | | | SGTSASLAITGLQAEDEADYYCQSYDRYTHPALLFGTGTKVTVL |
| 306 | 24224 | full AA | EPKSSDKTHTCPPCPAPEAAGGPSVFLFPPKPKDTLMISRTPEVTCVVVSVS |
| | | | HEDPEVKFNWYVDGVEVHNAKTKPREEQYNSTYRVVSVLTVLHQDWLN |
| | | | GKEYKCKVSNKALPAPIEKTISKAKGQPREPQVYVLPPSRDELTKNQVSLL |
| | | | CLVKGFYPSDIAVEWESNGQPENNYLTWPPVLDSDGSFFLYSKLTVDKSR |
| | | | WQQGNVFSCSVMHEALHNHYTQKSLSLSPGGGGGSGGGGSMSGRSANAG |
| | | | GGGSGGGGSQVQLVESGGGVVQPGRSLRLSCAASGFTFSSYGMHWVRQA |
| | | | PGKGLEWVAFIRYDGSNKYYADSVKGRFTISRDNSKNTLYLQMNSLRAED |
| | | | TAVYYCKTHGSHDNWGQGTMVTVSSGGSGGGSGGGSGGGSGGGSGQSV |
| | | | LTQPPSVSGAPGQRVTISCSGSRSNIGSNTVKWYQQLPGTAPKLLIYYNDQR |
| | | | PSGVPDRFSGSKSGTSASLAITGLQAEDEADYYCQSYDRYTHPALLFGTGT |
| | | | KVTVL |
| 307 | 24308 | full AA | EPKSSDKTHTCPPCPAPEAAGGPSVFLFPPKPKDTLMISRTPEVTCVVVSVS |
| | | | HEDPEVKFNWYVDGVEVHNAKTKPREEQYNSTYRVVSVLTVLHQDWLN |
| | | | GKEYKCKVSNKALPAPIEKTISKAKGQPREPQVYVLPPSRDELTKNQVSLL |
| | | | CLVKGFYPSDIAVEWESNGQPENNYLTWPPVLDSDGSFFLYSKLTVDKSR |
| | | | WQQGNVFSCSVMHEALHNHYTQKSLSLSPGGGGGSMSGRSANAGGGGSG |
| | | | GGGSQVQLVESGGGVVQPGRSLRLSCAASGFTFSSYGMHWVRQAPGKGL |
| | | | EWVAFIRYDGSNKYYADSVKGRFTISRDNSKNTLYLQMNSLRAEDTAVYY |
| | | | CKTHGSHDNWGQGTMVTVSSGGGGSMSGRSANAGGGGSGGGGSQSVLT |
| | | | QPPSVSGAPGQRVTISCSGSRSNIGSNTVKWYQQLPGTAPKLLIYYNDQRPS |
| | | | GVPDRFSGSKSGTSASLAITGLQAEDEADYYCQSYDRYTHPALLFGTGTKV |
| | | | TVL |
| 308 | 24831 | full AA | EPKSSDKTHTCPPCPAPEAAGGPSVFLFPPKPKDTLMISRTPEVTCVVVSVS |
| | | | HEDPEVKFNWYVDGVEVHNAKTKPREEQYNSTYRVVSVLTVLHQDWLN |
| | | | GKEYKCKVSNKALPAPIEKTISKAKGQPREPQVYVYPPSRDELTKNQVSLT |
| | | | CLVKGFYPSDIAVEWESNGQPENNYKTTPPVLDSDGSFALVSKLTVDKSR |
| | | | WQQGNVFSCSVMHEALHNHYTQKSLSLSPGGSADGGIWELKKDVYVVEL |
| | | | DWYPDAPGEMVVLTCDTPEEDGITWTLDQSSEVLGSGKTLTIQVKEFGDA |
| | | | GQYTCHKGGEVLSHSLLLLHKKEDGIWSTDILKDQKEPKNKTFLRCEAKN |
| | | | YSGRFTCWWLTTISTDLTFSVKSSRGSSDPQGVTCGAATLSAERVRGDNKE |
| | | | YEYSVECQEDVACPTAEETLPIEVMVDAVHKLKYENYTSSFFIRDIIKPDPP |
| | | | KNLQLKPLKNSRQVEVSWEYPDTWSTPHSYFSLTFCVQVQGKSKREKKDR |
| | | | VFTDKTSATVICRKNASISVRAQDRYYNSSWSEWASVPCSGGGGSGGGGS |
| | | | GGGGSNLPVATPDPGMFPCLHHSQNLLRAVSNMLQKARQTLEFYPCTSEEI |
| | | | DHEDITKDKTSTVEACLPLELTKNESCLNSRETSFITNGSCLASRKTSFMMA |
| | | | LCLSSIYEDLKMYQVEFKTMNAKLLMDPKRQIFLDQNMLAVIDELMQALN |
| | | | FNSETVPQKSSLEEPDFYKTKIKLCILLHAFRIRAVTIDRVMSYLNAS |
| 309 | 24832 | full AA | EPKSSDKTHTCPPCPAPEAAGGPSVFLFPPKPKDTLMISRTPEVTCVVVSVS |
| | | | HEDPEVKFNWYVDGVEVHNAKTKPREEQYNSTYRVVSVLTVLHQDWLN |
| | | | GKEYKCKVSNKALPAPIEKTISKAKGQPREPQVYVYPPSRDELTKNQVSLT |
| | | | CLVKGFYPSDIAVEWESNGQPENNYKTTPPVLDSDGSFALVSKLTVDKSR |
| | | | WQQGNVFSCSVMHEALHNHYTQKSLSLSPGGSADGGIWELKKDVYVVEL |
| | | | DWYPDAPGEMVVLTCDTPEEDGITWTLDQSSEVLGSGKTLTIQVKEFGDA |
| | | | GQYTCHKGGEVLSHSLLLLHKKEDGIWSTDILKDQKEPKNKTFLRCEAKN |
| | | | YSGRFTCWWLTTISTDLTFSVKSSRGSSDPQGVTCGAATLSAERVRGDNKE |
| | | | YEYSVECQEDSACPAAEESLPIEVMVDAVHKLKYENYTSSFFIRDIIKPDPP |
| | | | KNLQLKPLKNSRQVEVSWEYPDTWSTPHSYFSLTFCVQVQGKSKREKKDR |
| | | | VFTDKTSATVICRKNASISVRAQDRYYSSSWSEWASVPCSGGGGSGGGGS |
| | | | GGGGSNLPVATPDPGMFPCLHHSQNLLRAVSNMLQKARQTLEFYPCTSEEI |
| | | | DHEDITKDKTSTVEACLPLEATKNESCLNSRETSFITNGSCLASRKTSFMMA |
| | | | LCLSSIYEDLKMYQVEFKTMNAKLLMDPKRQIFLDQNMLAVIDELMQALN |
| | | | FNSETVPQKSSLEEPDFYKTKIKLCILLHAFRIRAVTIDRVMSYLNAS |
| 310 | 24833 | full AA | EPKSSDKTHTCPPCPAPEAAGGPSVFLFPPKPKDTLMISRTPEVTCVVVSVS |
| | | | HEDPEVKFNWYVDGVEVHNAKTKPREEQYNSTYRVVSVLTVLHQDWLN |
| | | | GKEYKCKVSNKALPAPIEKTISKAKGQPREPQVYVYPPSRDELTKNQVSLT |
| | | | CLVKGFYPSDIAVEWESNGQPENNYKTTPPVLDSDGSFALVSKLTVDKSR |
| | | | WQQGNVFSCSVMHEALHNHYTQKSLSLSPGGSADGGIWELKKDVYVVEL |
| | | | DWYPDAPGEMVVLTCDTPEEDGITWTLDQSSEVLGSGKTLTIQVKEFGDA |
| | | | GQYTCHKGGEVLSHSLLLLHKKEDGIWSTDILKDQKEPKNKTFLRCEAKN |
| | | | YSGRFTCWWLTTISTDLTFSVKSSRGSSDPQGVTCGAATLSAERVRGDNKE |
| | | | YEYSVECQEDSACPAAEESLPIEVMVDAVHKLKYENYTSSFFIRDIIKPDPP |
| | | | KNLQLKPLKNSRQVEVSWEYPDTWSTPHSYFSLTFCVQVQGKSKREKKDR |
| | | | VFTDKTSATVICRKNASISVRAQDRYYSSSWSEWASVPCSGGGGSGGGGS |
| | | | GGGGSNLPVATPDPGMFPCLHHSQNLLRAVSNMLQKARQTLEFYPCTSEEI |
| | | | DHEDITKDKTSTVEACLPLELTKNESCLNSRETSFITNGSCLASRKTSFMMA |
| | | | LCLSSIYEDLKMYQVEFKTMNAKLLMDPKRQIFLDQNMLAVIDELMQALN |
| | | | FNSETVPQKSSLEEPDFYKTKIKLCILLHAFAIRAVTIDRVMSYLNAS |
| 311 | 24834 | full AA | EPKSSDKTHTCPPCPAPEAAGGPSVFLFPPKPKDTLMISRTPEVTCVVVSVS |
| | | | HEDPEVKFNWYVDGVEVHNAKTKPREEQYNSTYRVVSVLTVLHQDWLN |
| | | | GKEYKCKVSNKALPAPIEKTISKAKGQPREPQVYVYPPSRDELTKNQVSLT |
| | | | CLVKGFYPSDIAVEWESNGQPENNYKTTPPVLDSDGSFALVSKLTVDKSR |
| | | | WQQGNVFSCSVMHEALHNHYTQKSLSLSPGGSADGGIWELKKDVYVVEL |
| | | | DWYPDAPGEMVVLTCDTPEEDGITWTLDQSSEVLGSGKTLTIQVKEFGDA |
| | | | GQYTCHKGGEVLSHSLLLLHKKEDGIWSTDILKDQKEPKNKTFLRCEAKN |
| | | | YSGRFTCWWLTTISTDLTFSVKSSRGSSDPQGVTCGAATLSAERVRGDNKE |
| | | | YEYSVECQEDSACPAAEESLPIEVMVDAVHKLKYENYTSSFFIRDIIKPDPP |
| | | | KNLQLKPLKNSRQVEVSWEYPDTWSTPHSYFSLTFCVQVQGKSKREKKDR |
| | | | VFTDKTSATVICRKNASISVRAQDRYYSSSWSEWASVPCSGGGGSGGGGS |
| | | | GGGGSNLPVATPDPGMFPCLHHSQNLLRAVSNMLQKARQTLEFYPCTSEEI |
| | | | DHEDITKDKTSTVEACLPLELTKNESCLNSRETSFITNGSCLASRKTSFMMA |
| | | | LCLSSIYEDLKMYQVEFKTMNAKLLMDPKRQIFLDQNMLAVIDELMQALN |
| | | | FNSETVPQKSSLEEPDFYKTKIKLCILLHAFRIRAATIDRVMSYLNAS |
| 312 | 24835 | full AA | EPKSSDKTHTCPPCPAPEAAGGPSVFLFPPKPKDTLMISRTPEVTCVVVSVS |
| | | | HEDPEVKFNWYVDGVEVHNAKTKPREEQYNSTYRVVSVLTVLHQDWLN |
| | | | GKEYKCKVSNKALPAPIEKTISKAKGQPREPQVYVYPPSRDELTKNQVSLT |
| | | | CLVKGFYPSDIAVEWESNGQPENNYKTTPPVLDSDGSFALVSKLTVDKSR |
| | | | WQQGNVFSCSVMHEALHNHYTQKSLSLSPGGSADGGIWELKKDVYVVEL |
| | | | DWYPDAPGEMVVLTCDTPEEDGITWTLDQSSEVLGSGKTLTIQVKEFGDA |
| | | | GQYTCHKGGEVLSHSLLLLHKKEDGIWSTDILKDQKEPKNKTFLRCEAKN |
| | | | YSGRFTCWWLTTISTDLTFSVKSSRGSSDPQGVTCGAATLSAERVRGDNKE |
| | | | YEYSVECQEDSACPAAEESLPIEVMVDAVHKLKYENYTSSFFIRDIIKPDPP |
| | | | KNLQLKPLKNSRQVEVSWEYPDTWSTPHSYFSLTFCVQVQGKSKREKKDR |
| | | | VFTDKTSATVICRKNASISVRAQDRYYSSSWSEWASVPCSGGGGSGGGGS |
| | | | GGGGSNLPVATPDPGMFPCLHHSQNLLRAVSNMLQKARQTLRFYPCTSEEI |
| | | | DHEDITKDKTSTVEACLPLELTKNESCLNSRETSFITNGSCLASRKTSFMMA |
| | | | LCLSSIYEDLKMYQVEFKTMNAKLLMDPERQIFLDQNMLAVIDELMQALN |
| | | | FNSETVPQKSSLEEPDFYETKIKLCILLHAFRIRAVTIDRVMSYLNAS |
| 313 | 24836 | full AA | EPKSSDKTHTCPPCPAPEAAGGPSVFLFPPKPKDTLMISRTPEVTCVVVSVS |
| | | | HEDPEVKFNWYVDGVEVHNAKTKPREEQYNSTYRVVSVLTVLHQDWLN |
| | | | GKEYKCKVSNKALPAPIEKTISKAKGQPREPQVYVYPPSRDELTKNQVSLT |
| | | | CLVKGFYPSDIAVEWESNGQPENNYKTTPPVLDSDGSFALVSKLTVDKSR |
| | | | WQQGNVFSCSVMHEALHNHYTQKSLSLSPGGSADGGIWELKKDVYVVEL |
| | | | DWYPDAPGEMVVLTCDTPEEDGITWTLDQSSEVLGSGKTLTIQVKEFGDA |
| | | | GQYTCHKGGEVLSHSLLLLHKKEDGIWSTDILKDQKEPKNKTFLRCEAKN |
| | | | YSGRFTCWWLTTISTDLTFSVKSSRGSSDPQGVTCGAATLSAERVRGDNKE |
| | | | YEYSVECQEDSACPAAEESLPIEVMVDAVHKLKYENYTSSFFIRDIIKPDPP |
| | | | KNLQLKPLKNSRQVEVSWEYPDTWSTPHSYFSLTFCVQVQGKSKREKKDR |
| | | | VFTDKTSATVICRKNASISVRAQDRYYSSSWSEWASVPCSGGGGSGGGGS |
| | | | GGGGSNLPVATPDPGMFPCLHHSQNLLRAVSNMLQKARQTLEFYSCTSEEI |
| | | | DHEDITKDKTSTVEACLPLELTKNESCLNSRETSFITNGSCLASRKTSFMMA |
| | | | LCLSSIYEDLKMYQVEFKTMNAKLLMDPKRQIFLDQNMLAVIDELMQALN |
| | | | FNSETVPQKSSLEEPDFYKTKQKLCSLLHAFRIRAVTIDRVMSYLNAS |
| 314 | 24837 | full AA | EPKSSDKTHTCPPCPAPEAAGGPSVFLFPPKPKDTLMISRTPEVTCVVVSVS |
| | | | HEDPEVKFNWYVDGVEVHNAKTKPREEQYNSTYRVVSVLTVLHQDWLN |
| | | | GKEYKCKVSNKALPAPIEKTISKAKGQPREPQVYVYPPSRDELTKNQVSLT |
| | | | CLVKGFYPSDIAVEWESNGQPENNYKTTPPVLDSDGSFALVSKLTVDKSR |
| | | | WQQGNVFSCSVMHEALHNHYTQKSLSLSPGGSADGGIWELKKDVYVVEL |
| | | | DWYPDAPGEMVVLTCDTPEEDGITWTLDQSSEVLGSGKTLTIQVKEFGDA |
| | | | GQYTCHKGGEVLSHSLLLLHKKEDGIWSTDILKDQKEPKNKTFLRCEAKN |
| | | | YSGRFTCWWLTTISTDLTFSVKSSRGSSDPQGVTCGAATLSAERVRGDNKE |
| | | | YEYSVECQEDSACPAAEESLPIEVMVDAVHKLKYENYTSSFFIRDIIKPDPP |
| | | | KNLQLKPLKNSRQVEVSWEYPDTWSTPHSYFSLTFCVQVQGKSKREKKDR |
| | | | VFTDKTSATVICRKNASISVRAQDRYYSSSWSEWASVPCSGGGGSGGGGS |
| | | | GGGGSNLPVATPDPGMFPCLHHSQNLLRAVSNMLQKARQTLESSPCTSEEI |
| | | | DHEDITKDKTSTVEACLPLELTKNESCLNSRETSFITNGSCLASRKTSFMMA |
| | | | LCLSSIYEDLKMYQVEFKTMNAKLLMDPKRQIFLDQNMLAVIDELMQALN |
| | | | FNSETVPQKSSLEEPDFSKTKIKLCILLHAFRIRAVTIDRVMSYLNAS |
| 315 | 24838 | full AA | EPKSSDKTHTCPPCPAPEAAGGPSVFLFPPKPKDTLMISRTPEVTCVVVSVS |
| | | | HEDPEVKFNWYVDGVEVHNAKTKPREEQYNSTYRVVSVLTVLHQDWLN |
| | | | GKEYKCKVSNKALPAPIEKTISKAKGQPREPQVYVYPPSRDELTKNQVSLT |
| | | | CLVKGFYPSDIAVEWESNGQPENNYKTTPPVLDSDGSFALVSKLTVDKSR |
| | | | WQQGNVFSCSVMHEALHNHYTQKSLSLSPGGSADGGIWELKKDVYVVEL |
| | | | DWYPDAPGEMVVLTCDTPEEDGITWTLDQSSEVLGSGKTLTIQVKEFGDA |
| | | | GQYTCHKGGEVLSHSLLLLHKKEDGIWSTDILKDQKEPKNKTFLRCEAKN |
| | | | YSGRFTCWWLTTISTDLTFSVKSSRGSSDPQGVTCGAATLSAERVRGDNKE |
| | | | YEYSVECQEDSACPAAEESLPIEVMVDAVHKLKYENYTSSFFIRDIIKPDPP |
| | | | KNLQLKPLKNSRQVEVSWEYPDTWSTPHSYFSLTFCVQVQGKSKREKKDR |
| | | | VFTDKTSATVICRKNASISVRAQDRYYSSSWSEWASVPCSGGGGSGGGGS |
| | | | GGGGSNLPVATPDPGMFPCLHHSQNLLRAVSNMLQKARQTLEFYPCASRE |
| | | | SRHEDITKDKTSTVEACLPLELTKNESCLNSRETSFITNGSCLASRKTSFMM |
| | | | ALCLSSIYEDLKMYQVEFKTMNAKLLMDPKRQIFLDQNMLAVIDELMQAL |
| | | | NFNSETVPQKSSLEEPDFYKTKIKLCILLHAFRIRAVTIDRVMSYLNAS |
| 316 | 24839 | full AA | EPKSSDKTHTCPPCPAPEAAGGPSVFLFPPKPKDTLMISRTPEVTCVVVSVS |
| | | | HEDPEVKFNWYVDGVEVHNAKTKPREEQYNSTYRVVSVLTVLHQDWLN |
| | | | GKEYKCKVSNKALPAPIEKTISKAKGQPREPQVYVYPPSRDELTKNQVSLT |
| | | | CLVKGFYPSDIAVEWESNGQPENNYKTTPPVLDSDGSFALVSKLTVDKSR |
| | | | WQQGNVFSCSVMHEALHNHYTQKSLSLSPGGSADGGIWELKKDVYVVEL |
| | | | DWYPDAPGEMVVLTCDTPEEDGITWTLDQSSEVLGSGKTLTIQVKEFGDA |
| | | | GQYTCHKGGEVLSHSLLLLHKKEDGIWSTDILKDQKEPKNKTFLRCEAKN |
| | | | YSGRFTCWWLTTISTDLTFSVKSSRGSSDPQGVTCGAATLSAERVRGDNKE |
| | | | YEYSVECQEDSACPAAEESLPIEVMVDAVHKLKYENYTSSFFIRDIIKPDPP |
| | | | KNLQLKPLKNSRQVEVSWEYPDTWSTPHSYFSLTFCVQVQGKSKREKKDR |
| | | | VFTDKTSATVICRKNASISVRAQDRYYSSSWSEWASVPCSGGGGSGGGGS |
| | | | GGGGSNLPVATPDPGMFPCLHHSQNLLRAVSNMLQKARQTLEFYPCASRK |
| | | | SRHKDITKDKTSTVEACLPLELTKNESCLNSRETSFITNGSCLASRKTSFMM |
| | | | ALCLSSIYEDLKMYQVEFKTMNAKLLMDPKRQIFLDQNMLAVIDELMQAL |
| | | | NFNSETVPQKSSLEEPDFYKTKIKLCILLHAFRIRAVTIDRVMSYLNAS |
| 317 | 24840 | full AA | EPKSSDKTHTCPPCPAPEAAGGPSVFLFPPKPKDTLMISRTPEVTCVVVSVS |
| | | | HEDPEVKFNWYVDGVEVHNAKTKPREEQYNSTYRVVSVLTVLHQDWLN |
| | | | GKEYKCKVSNKALPAPIEKTISKAKGQPREPQVYVYPPSRDELTKNQVSLT |
| | | | CLVKGFYPSDIAVEWESNGQPENNYKTTPPVLDSDGSFALVSKLTVDKSR |
| | | | WQQGNVFSCSVMHEALHNHYTQKSLSLSPGGSADGGIWELKKDVYVVEL |
| | | | DWYPDAPGEMVVLTCDTPEEDGITWTLSQSSRVLGSGKTLTIQVSSFGDAG |
| | | | QYTCHKGGEVLSHSLLLLHKKEDGIWSTDILKDQKEPKNKTFLRCEAKNYS |
| | | | GRFTCWWLTTISTDLTFSVKSSRGSSDPQGVTCGAATLSAERVRGDNKEYE |
| | | | YSVECQEDSACPAAEESLPIEVMVDAVHDLKYENYTSSFFIRDIIKPDPPKN |
| | | | LQLKPLKNSRQVEVSWEYPDTWSTPHSYFSLTFCVQVQGKSKREKKDRVF |
| | | | TDKTSATVICRKNASISVRAQDRYYSSSWSEWASVPCSGGGGSGGGGSGG |
| | | | GGSNLPVATPDPGMFPCLHHSQNLLRAVSNMLQKARQTLEFYPCTSEEIDH |
| | | | EDITKDKTSTVEACLPLELTKNESCLNSRETSFITNGSCLASRKTSFMMALC |
| | | | LSSIYEDLKMYQVEFKTMNAKLLMDPKRQIFLDQNMLAVIDELMQALNFN |
| | | | SETVPQKSSLEEPDFYKTKIKLCILLHAFRIRAVTIDRVMSYLNAS |
| 318 | 24841 | full AA | EPKSSDKTHTCPPCPAPEAAGGPSVFLFPPKPKDTLMISRTPEVTCVVVSVS |
| | | | HEDPEVKFNWYVDGVEVHNAKTKPREEQYNSTYRVVSVLTVLHQDWLN |
| | | | GKEYKCKVSNKALPAPIEKTISKAKGQPREPQVYVYPPSRDELTKNQVSLT |
| | | | CLVKGFYPSDIAVEWESNGQPENNYKTTPPVLDSDGSFALVSKLTVDKSR |
| | | | WQQGNVFSCSVMHEALHNHYTQKSLSLSPGGSADGGIWELKKDVYVVEL |
| | | | DWYPDAPGEMVVLTCDTPEEDGITWTLDQSSEVLGSGKTLTIQVKEFGDA |
| | | | GQYTCHKGGEVLSHSLLLLHKKEDGIWSTDILKDQSSPKNKTFLRCEAKNY |
| | | | SGRFTCWWLTTISTDLTFSVKSSRGSSDPQGVTCGAATLSAERVSGDNKEY |
| | | | EYSVECQEDSACPAAEESLPIEVMVDAVHKLKYENYTSSFFIRDIIKPDPPK |
| | | | NLQLKPLKNSRQVEVSWEYPDTWSTPHSYFSLTFCVQVQGKSKREKKDRV |
| | | | FTDKTSATVICRKNASISVRAQDRYYSSSWSEWASVPCSGGGGSGGGGSG |
| | | | GGGSNLPVATPDPGMFPCLHHSQNLLRAVSNMLQKARQTLEFYPCTSEEID |
| | | | HEDITKDKTSTVEACLPLELTKNESCLNSRETSFITNGSCLASRKTSFMMAL |
| | | | CLSSIYEDLKMYQVEFKTMNAKLLMDPKRQIFLDQNMLAVIDELMQALNF |
| | | | NSETVPQKSSLEEPDFYKTKIKLCILLHAFRIRAVTIDRVMSYLNAS |
| 319 | 24842 | full AA | EPKSSDKTHTCPPCPAPEAAGGPSVFLFPPKPKDTLMISRTPEVTCVVVSVS |
| | | | HEDPEVKFNWYVDGVEVHNAKTKPREEQYNSTYRVVSVLTVLHQDWLN |
| | | | GKEYKCKVSNKALPAPIEKTISKAKGQPREPQVYVYPPSRDELTKNQVSLT |
| | | | CLVKGFYPSDIAVEWESNGQPENNYKTTPPVLDSDGSFALVSKLTVDKSR |
| | | | WQQGNVFSCSVMHEALHNHYTQKSLSLSPGGSADGGIWELKKDVYVVEL |
| | | | DWYPDAPGEMVVLTCDTPEEDGITWTLDQSSEVLGSGKTLTIQVKEFGDA |
| | | | GQYTCHKGGEVLSHSLLLLHKKEDGIWSTDILKDQKEPKNKTFLRCEAKN |
| | | | YSGRFTCWWLTTISTDLTFSVKSSRGSSDPQGVTCGAATLSAERVRGDNKE |
| | | | YEYSVECQEDSACPAAEESLPISVMVDAVHKLKYENYSSRFFIRDIIKPDPP |
| | | | KNLQLKPLKNSRQVEVSWEYPDTWSTPHSYFSLTFCVQVQGKSKREKKDR |
| | | | VFTDKTSATVICRKNASISVRAQDRYYSSSWSEWASVPCSGGGGSGGGGS |
| | | | GGGGSNLPVATPDPGMFPCLHHSQNLLRAVSNMLQKARQTLEFYPCTSEEI |
| | | | DHEDITKDKTSTVEACLPLELTKNESCLNSRETSFITNGSCLASRKTSFMMA |
| | | | LCLSSIYEDLKMYQVEFKTMNAKLLMDPKRQIFLDQNMLAVIDELMQALN |
| | | | FNSETVPQKSSLEEPDFYKTKIKLCILLHAFRIRAVTIDRVMSYLNAS |
| 320 | 26498 | full AA | EPKSSDKTHTCPPCPAPEAAGGPSVFLFPPKPKDTLMISRTPEVTCVVVSVS |
| | | | HEDPEVKFNWYVDGVEVHNAKTKPREEQYNSTYRVVSVLTVLHQDWLN |
| | | | GKEYKCKVSNKALPAPIEKTISKAKGQPREPQVYVLPPSRDELTKNQVSLL |
| | | | CLVKGFYPSDIAVEWESNGQPENNYLTWPPVLDSDGSFFLYSKLTVDKSR |
| | | | WQQGNVFSCSVMHEALHNHYTQKSLSLSPGGGGGSGGGGSMSGRSANAG |
| | | | GGGSGGGGSQVQLVESGGGVVQPGRSLRLSCAASGVTFSSYGMHWVRQA |
| | | | PGKGLEWVAFIRYDGSNKYYADSVKGRFTISRDNSKNTLYLQMNSLRAED |
| | | | TAVYYCKTHGSHDNWGQGTMVTVSSGGSGGGSGGGSGGGSGGGSGQSV |
| | | | LTQPPSVSGAPGQRVTISCSGSRSNIGSNTVKWYQQLPGTAPKLLIYYNDQR |
| | | | PSGVPDRFSGSKSGTSASLAITGLQAEDEADYYCQSYDRYTHPALLFGTGT |
| | | | KVTVL |
| 321 | 23571 | full nt | GAGCCAAAGAGCTCCGACAAGACCCACACATGCCCCCCTTGTCCGGCG |
| | | | CCAGAGGCAGCAGGAGGACCAAGCGTGTTCCTGTTTCCACCCAAGCCC |
| | | | AAAGACACCCTGATGATTAGCCGAACCCCTGAAGTCACATGCGTGGTC |
| | | | GTGTCCGTGTCTCACGAGGACCCAGAAGTCAAGTTCAACTGGTACGTGG |
| | | | ATGGCGTCGAGGTGCATAATGCCAAGACAAAACCCCGGGAGGAACAGT |
| | | | ACAACAGCACCTATAGAGTCGTGTCCGTCCTGACAGTGCTGCACCAGGA |
| | | | TTGGCTGAACGGCAAGGAATATAAGTGCAAAGTGTCCAATAAGGCCCT |
| | | | GCCCGCTCCTATCGAGAAAACCATTTCTAAGGCAAAAGGCCAGCCTCGC |
| | | | GAGCCTCAGGTGTACGTGCTGCCACCTTCCCGCGACGAGCTGACCAAGA |
| | | | ATCAGGTGTCTCTGCTGTGCCTGGTGAAGGGCTTCTATCCAAGCGATAT |
| | | | CGCAGTGGAGTGGGAGTCCAACGGACAGCCCGAGAACAATTACCTGAC |
| | | | CTGGCCACCCGTGCTGGACAGCGATGGCTCCTTCTTTCTGTATTCCAAG |
| | | | CTGACAGTGGACAAGTCTAGATGGCAGCAGGGCAACGTGTTCAGCTGT |
| | | | TCCGTGATGCACGAGGCCCTGCACAACCACTACACCCAGAAGTCTCTGA |
| | | | GCTTAAGCCCTGGAGGAGGAGGAGGCTCTGGAGGAGGAGGCTCCATGA |
| | | | GCGGGCGGAGCGCCAACGCAGGGGGCGGCGGCTCTGGCGGCGGCGGC |
| | | | AGCCAGGTGCAGCTGGTGGAGAGCGGCGGCGGCGTGGTGCAGCCCGGC |
| | | | AGAAGCCTGCGGCTGAGCTGCGCAGCCTCTGGCTTCACCTTTAGCTCCT |
| | | | ACGGCATGCACTGGGTGCGGCAGGCCCCTGGCAAGGGACTGGAGTGGG |
| | | | TGGCCTTCATCAGATATGACGGCTCCAATAAGTACTATGCCGATTCTGT |
| | | | GAAGGGCAGGTTTACCATCAGCCGCGACAACTCCAAGAATACACTGTA |
| | | | CCTGCAGATGAACTCCCTGAGGGCCGAGGACACCGCCGTGTACTATTGC |
| | | | AAGACACACGGCTCTCACGATAATTGGGGCCAGGGCACCATGGTGACA |
| | | | GTGTCTTCCGGAGGAGGAGGCAGCGGCGGCGGGAGCGGCGGCGGCAGC |
| | | | GGGGGTGGAGGCTCCGGAGGAGGAGGCTCTCAGAGCGTGCTGACCCAG |
| | | | CCACCTTCCGTGTCTGGAGCCCCCGGACAGAGGGTGACAATCAGCTGTT |
| | | | CCGGCTCTCGCAGCAACATCGGCAGCAATACCGTGAAGTGGTATCAGC |
| | | | AGCTGCCAGGCACAGCCCCCAAGCTGCTGATCTACTATAATGACCAGCG |
| | | | GCCTTCCGGCGTGCCAGATAGATTCTCCGGCTCTAAGAGCGGCACCTCC |
| | | | GCCTCTCTGGCCATCACAGGCCTGCAGGCAGAGGACGAGGCAGATTAC |
| | | | TATTGTCAGTCCTACGATAGATATACCCACCCCGCCCTGCTGTTTGGCA |
| | | | CCGGCACAAAGGTGACAGTGCTG |
| 322 | 24219 | full nt | GAGCCAAAGAGCTCCGACAAGACCCACACATGCCCCCCTTGTCCGGCG |
| | | | CCAGAGGCAGCAGGAGGACCAAGCGTGTTCCTGTTTCCACCCAAGCCC |
| | | | AAAGACACCCTGATGATTAGCCGAACCCCTGAAGTCACATGCGTGGTC |
| | | | GTGTCCGTGTCTCACGAGGACCCAGAAGTCAAGTTCAACTGGTACGTGG |
| | | | ATGGCGTCGAGGTGCATAATGCCAAGACAAAACCCCGGGAGGAACAGT |
| | | | ACAACAGCACCTATAGAGTCGTGTCCGTCCTGACAGTGCTGCACCAGGA |
| | | | TTGGCTGAACGGCAAGGAATATAAGTGCAAAGTGTCCAATAAGGCCCT |
| | | | GCCCGCTCCTATCGAGAAAACCATTTCTAAGGCAAAAGGCCAGCCTCGC |
| | | | GAGCCTCAGGTGTACGTGCTGCCACCTTCCCGCGACGAGCTGACCAAGA |
| | | | ATCAGGTGTCTCTGCTGTGCCTGGTGAAGGGCTTCTATCCAAGCGATAT |
| | | | CGCAGTGGAGTGGGAGTCCAACGGACAGCCCGAGAACAATTACCTGAC |
| | | | CTGGCCACCCGTGCTGGACAGCGATGGCTCCTTCTTTCTGTATTCCAAG |
| | | | CTGACAGTGGACAAGTCTAGATGGCAGCAGGGCAACGTGTTCAGCTGT |
| | | | TCCGTGATGCACGAGGCCCTGCACAACCACTACACCCAGAAGTCTCTGA |
| | | | GCTTAAGCCCTGGAGGAGGAGGAGGCTCTGGAGGAGGAGGCTCCATGA |
| | | | GCGGGCGGAGCGCCAACGCAGGGGGCGGCGGCTCTCAGGTGCAGCTGG |
| | | | TGGAGAGCGGAGGAGGAGTGGTGCAGCCCGGCAGAAGCCTGCGGCTGA |
| | | | GCTGCGCAGCCTCTGGCTTCACCTTTAGCTCCTACGGCATGCACTGGGT |
| | | | GCGGCAGGCCCCTGGCAAGGGACTGGAGTGGGTGGCCTTCATCAGATA |
| | | | TGACGGCTCCAATAAGTACTATGCCGATTCTGTGAAGGGCAGGTTTACC |
| | | | ATCAGCCGCGACAACTCCAAGAATACACTGTACCTGCAGATGAACTCCC |
| | | | TGAGGGCCGAGGACACCGCCGTGTACTATTGCAAGACACACGGCTCTC |
| | | | ACGATAATTGGGGCCAGGGCACCATGGTGACAGTGTCTTCCGGAGGAG |
| | | | GAGGCAGCATGAGCGGGCGGAGCGCCAACGCAGGGGGTGGAGGCTCC |
| | | | GGAGGAGGAGGCTCTCAGAGCGTGCTGACCCAGCCACCTTCCGTGTCTG |
| | | | GAGCCCCCGGACAGAGGGTGACAATCAGCTGTTCCGGCTCTCGCAGCA |
| | | | ACATCGGCAGCAATACCGTGAAGTGGTATCAGCAGCTGCCAGGCACAG |
| | | | CCCCCAAGCTGCTGATCTACTATAATGACCAGCGGCCTTCCGGCGTGCC |
| | | | AGATAGATTCTCCGGCTCTAAGAGCGGCACCTCCGCCTCTCTGGCCATC |
| | | | ACAGGCCTGCAGGCAGAGGACGAGGCAGATTACTATTGTCAGAGCTAC |
| | | | GATAGATATACCCACCCCGCCCTGCTGTTTGGCACCGGCACAAAGGTGA |
| | | | CAGTGCTG |
| 323 | 24221 | full nt | GAGCCAAAGAGCTCCGACAAGACCCACACATGCCCCCCTTGTCCGGCG |
| | | | CCAGAGGCAGCAGGAGGACCAAGCGTGTTCCTGTTTCCACCCAAGCCC |
| | | | AAAGACACCCTGATGATTAGCCGAACCCCTGAAGTCACATGCGTGGTC |
| | | | GTGTCCGTGTCTCACGAGGACCCAGAAGTCAAGTTCAACTGGTACGTGG |
| | | | ATGGCGTCGAGGTGCATAATGCCAAGACAAAACCCCGGGAGGAACAGT |
| | | | ACAACAGCACCTATAGAGTCGTGTCCGTCCTGACAGTGCTGCACCAGGA |
| | | | TTGGCTGAACGGCAAGGAATATAAGTGCAAAGTGTCCAATAAGGCCCT |
| | | | GCCCGCTCCTATCGAGAAAACCATTTCTAAGGCAAAAGGCCAGCCTCGC |
| | | | GAGCCTCAGGTGTACGTGCTGCCACCTTCCCGCGACGAGCTGACCAAGA |
| | | | ATCAGGTGTCTCTGCTGTGCCTGGTGAAGGGCTTCTATCCAAGCGATAT |
| | | | CGCAGTGGAGTGGGAGTCCAACGGACAGCCCGAGAACAATTACCTGAC |
| | | | CTGGCCACCCGTGCTGGACAGCGATGGCTCCTTCTTTCTGTATTCCAAG |
| | | | CTGACAGTGGACAAGTCTAGATGGCAGCAGGGCAACGTGTTCAGCTGT |
| | | | TCCGTGATGCACGAGGCCCTGCACAACCACTACACCCAGAAGTCTCTGA |
| | | | GCTTAAGCCCTGGAGGAGGAGGAGGCTCCATGAGCGGGCGGAGCGCCA |
| | | | ACGCAGGGGGCGGCGGCTCTCAGGTGCAGCTGGTGGAGAGCGGAGGAG |
| | | | GAGTGGTGCAGCCCGGCAGAAGCCTGCGGCTGAGCTGCGCAGCCTCTG |
| | | | GCTTCACCTTTAGCTCCTACGGCATGCACTGGGTGCGGCAGGCCCCTGG |
| | | | CAAGGGACTGGAGTGGGTGGCCTTCATCAGATATGACGGCTCCAATAA |
| | | | GTACTATGCCGATTCTGTGAAGGGCAGGTTTACCATCAGCCGCGACAAC |
| | | | TCCAAGAATACACTGTACCTGCAGATGAACTCTCTGAGGGCCGAGGAC |
| | | | ACCGCCGTGTACTATTGCAAGACACACGGCTCCCACGATAATTGGGGCC |
| | | | AGGGCACCATGGTGACAGTGTCTTCCGGAGGAGGAGGCAGCATGAGCG |
| | | | GGCGGAGCGCCAACGCAGGGGGTGGAGGCTCCGGAGGAGGAGGCTCTC |
| | | | AGAGCGTGCTGACCCAGCCACCTTCCGTGTCTGGAGCCCCCGGACAGA |
| | | | GGGTGACAATCAGCTGTTCCGGCTCTCGCAGCAACATCGGCAGCAATAC |
| | | | CGTGAAGTGGTATCAGCAGCTGCCAGGCACAGCCCCCAAGCTGCTGAT |
| | | | CTACTATAATGACCAGCGGCCTTCCGGCGTGCCAGATAGATTCTCCGGC |
| | | | TCTAAGAGCGGCACCTCCGCCTCTCTGGCCATCACAGGCCTGCAGGCAG |
| | | | AGGACGAGGCAGATTACTATTGTCAGAGCTACGATAGATATACCCACC |
| | | | CCGCCCTGCTGTTTGGCACCGGCACAAAGGTGACAGTGCTG |
| 324 | 24222 | full nt | GAGCCAAAGAGCTCCGACAAGACCCACACATGCCCCCCTTGTCCGGCG |
| | | | CCAGAGGCAGCAGGAGGACCAAGCGTGTTCCTGTTTCCACCCAAGCCC |
| | | | AAAGACACCCTGATGATTAGCCGAACCCCTGAAGTCACATGCGTGGTC |
| | | | GTGTCCGTGTCTCACGAGGACCCAGAAGTCAAGTTCAACTGGTACGTGG |
| | | | ATGGCGTCGAGGTGCATAATGCCAAGACAAAACCCCGGGAGGAACAGT |
| | | | ACAACAGCACCTATAGAGTCGTGTCCGTCCTGACAGTGCTGCACCAGGA |
| | | | TTGGCTGAACGGCAAGGAATATAAGTGCAAAGTGTCCAATAAGGCCCT |
| | | | GCCCGCTCCTATCGAGAAAACCATTTCTAAGGCAAAAGGCCAGCCTCGC |
| | | | GAGCCTCAGGTGTACGTGCTGCCACCTTCCCGCGACGAGCTGACCAAGA |
| | | | ATCAGGTGTCTCTGCTGTGCCTGGTGAAGGGCTTCTATCCAAGCGATAT |
| | | | CGCAGTGGAGTGGGAGTCCAACGGACAGCCCGAGAACAATTACCTGAC |
| | | | CTGGCCACCCGTGCTGGACAGCGATGGCTCCTTCTTTCTGTATTCCAAG |
| | | | CTGACAGTGGACAAGTCTAGATGGCAGCAGGGCAACGTGTTCAGCTGT |
| | | | TCCGTGATGCACGAGGCCCTGCACAACCACTACACCCAGAAGTCTCTGA |
| | | | GCTTAAGCCCTGGAGGAGGCTCCATGAGCGGGCGGAGCGCCAACGCAG |
| | | | GGGGCAGCCAGGTGCAGCTGGTGGAGAGCGGAGGAGGAGTGGTGCAG |
| | | | CCCGGCAGAAGCCTGCGGCTGAGCTGCGCAGCCTCTGGCTTCACCTTTA |
| | | | GCTCCTACGGCATGCACTGGGTGCGGCAGGCCCCTGGCAAGGGACTGG |
| | | | AGTGGGTGGCCTTCATCAGATATGACGGCTCCAATAAGTACTATGCCGA |
| | | | TTCTGTGAAGGGCAGGTTTACCATCAGCCGCGACAACTCCAAGAATACA |
| | | | CTGTACCTGCAGATGAACTCTCTGAGGGCCGAGGACACCGCCGTGTACT |
| | | | ATTGCAAGACACACGGCTCCCACGATAATTGGGGCCAGGGCACCATGG |
| | | | TGACAGTGTCTAGCGGAGGAGGAGGCAGCATGAGCGGGCGGAGCGCCA |
| | | | ACGCAGGGGGTGGAGGCTCCGGAGGAGGAGGCTCTCAGAGCGTGCTGA |
| | | | CCCAGCCACCTTCCGTGTCTGGAGCCCCCGGACAGAGGGTGACAATCA |
| | | | GCTGTTCCGGCTCTCGCAGCAACATCGGCAGCAATACCGTGAAGTGGTA |
| | | | TCAGCAGCTGCCAGGCACAGCCCCCAAGCTGCTGATCTACTATAATGAC |
| | | | CAGCGGCCTTCCGGCGTGCCAGATAGATTCTCCGGCTCTAAGAGCGGCA |
| | | | CCTCCGCCTCTCTGGCCATCACAGGCCTGCAGGCAGAGGACGAGGCAG |
| | | | ATTACTATTGTCAGAGCTACGATAGATATACCCACCCCGCCCTGCTGTT |
| | | | TGGCACCGGCACAAAGGTGACAGTGCTG |
| 325 | 24224 | full nt | GAGCCAAAGAGCTCCGACAAGACCCACACATGCCCCCCTTGTCCGGCG |
| | | | CCAGAGGCAGCAGGAGGACCAAGCGTGTTCCTGTTTCCACCCAAGCCC |
| | | | AAAGACACCCTGATGATTAGCCGAACCCCTGAAGTCACATGCGTGGTC |
| | | | GTGTCCGTGTCTCACGAGGACCCAGAAGTCAAGTTCAACTGGTACGTGG |
| | | | ATGGCGTCGAGGTGCATAATGCCAAGACAAAACCCCGGGAGGAACAGT |
| | | | ACAACAGCACCTATAGAGTCGTGTCCGTCCTGACAGTGCTGCACCAGGA |
| | | | TTGGCTGAACGGCAAGGAATATAAGTGCAAAGTGTCCAATAAGGCCCT |
| | | | GCCCGCTCCTATCGAGAAAACCATTTCTAAGGCAAAAGGCCAGCCTCGC |
| | | | GAGCCTCAGGTGTACGTGCTGCCACCTTCCCGCGACGAGCTGACCAAGA |
| | | | ATCAGGTGTCTCTGCTGTGCCTGGTGAAGGGCTTCTATCCAAGCGATAT |
| | | | CGCAGTGGAGTGGGAGTCCAACGGACAGCCCGAGAACAATTACCTGAC |
| | | | CTGGCCACCCGTGCTGGACAGCGATGGCTCCTTCTTTCTGTATTCCAAG |
| | | | CTGACAGTGGACAAGTCTAGATGGCAGCAGGGCAACGTGTTCAGCTGT |
| | | | TCCGTGATGCACGAGGCCCTGCACAACCACTACACCCAGAAGTCTCTGA |
| | | | GCTTAAGCCCTGGAGGAGGAGGAGGCTCTGGAGGAGGAGGCTCCATGA |
| | | | GCGGGCGGAGCGCCAACGCAGGGGGCGGCGGCTCCGGCGGCGGCGGCT |
| | | | CTCAGGTGCAGCTGGTGGAGAGCGGAGGAGGAGTGGTGCAGCCCGGCA |
| | | | GAAGCCTGCGGCTGAGCTGCGCAGCCAGCGGCTTCACCTTTAGCTCCTA |
| | | | CGGCATGCACTGGGTGCGGCAGGCCCCTGGCAAGGGACTGGAGTGGGT |
| | | | GGCCTTCATCAGATATGACGGCAGCAATAAGTACTATGCCGATTCCGTG |
| | | | AAGGGCAGGTTTACCATCTCCCGCGACAACTCTAAGAATACACTGTACC |
| | | | TGCAGATGAACTCCCTGCGCGCAGAGGACACCGCCGTGTACTATTGCAA |
| | | | GACACACGGCTCTCACGATAATTGGGGCCAGGGCACCATGGTGACAGT |
| | | | GTCTAGCGGAGGCAGCGGAGGAGGCTCCGGAGGAGGCTCTGGCGGCGG |
| | | | CAGCGGCGGCGGCTCTGGACAGAGCGTGCTGACCCAGCCACCTAGCGT |
| | | | GTCCGGAGCCCCCGGCCAGAGGGTGACAATCTCTTGTAGCGGCTCCCGC |
| | | | TCTAACATCGGCAGCAATACCGTGAAGTGGTATCAGCAGCTGCCAGGC |
| | | | ACAGCCCCCAAGCTGCTGATCTACTATAACGACCAGCGGCCTTCCGGCG |
| | | | TGCCAGATAGATTCAGCGGCTCCAAGTCTGGCACCAGCGCCTCCCTGGC |
| | | | CATCACAGGCCTGCAGGCAGAGGACGAGGCAGATTACTATTGTCAGTC |
| | | | CTACGATCGGTATACCCACCCCGCCCTGCTGTTTGGCACCGGCACAAAG |
| | | | GTGACAGTGCTG |
| 326 | 24308 | full nt | GAGCCAAAGAGCTCCGACAAGACCCACACATGCCCCCCTTGTCCGGCG |
| | | | CCAGAGGCAGCAGGAGGACCAAGCGTGTTCCTGTTTCCACCCAAGCCC |
| | | | AAAGACACCCTGATGATTAGCCGAACCCCTGAAGTCACATGCGTGGTC |
| | | | GTGTCCGTGTCTCACGAGGACCCAGAAGTCAAGTTCAACTGGTACGTGG |
| | | | ATGGCGTCGAGGTGCATAATGCCAAGACAAAACCCCGGGAGGAACAGT |
| | | | ACAACAGCACCTATAGAGTCGTGTCCGTCCTGACAGTGCTGCACCAGGA |
| | | | TTGGCTGAACGGCAAGGAATATAAGTGCAAAGTGTCCAATAAGGCCCT |
| | | | GCCCGCTCCTATCGAGAAAACCATTTCTAAGGCAAAAGGCCAGCCTCGC |
| | | | GAGCCTCAGGTGTACGTGCTGCCACCTTCCCGCGACGAGCTGACCAAGA |
| | | | ATCAGGTGTCTCTGCTGTGCCTGGTGAAGGGCTTCTATCCAAGCGATAT |
| | | | CGCAGTGGAGTGGGAGTCCAACGGACAGCCCGAGAACAATTACCTGAC |
| | | | CTGGCCACCCGTGCTGGACAGCGATGGCTCCTTCTTTCTGTATTCCAAG |
| | | | CTGACAGTGGACAAGTCTAGATGGCAGCAGGGCAACGTGTTCAGCTGT |
| | | | TCCGTGATGCACGAGGCCCTGCACAACCACTACACCCAGAAGTCTCTGA |
| | | | GCTTAAGCCCTGGCGGCGGCGGCGGCTCCATGAGCGGGCGGAGCGCCA |
| | | | ACGCAGGGGGAGGAGGCTCTGGAGGAGGAGGCAGCCAGGTGCAGCTG |
| | | | GTGGAGTCTGGAGGAGGAGTGGTGCAGCCCGGCAGAAGCCTGCGGCTG |
| | | | AGCTGCGCAGCCTCTGGCTTCACCTTTAGCTCCTACGGCATGCACTGGG |
| | | | TGCGGCAGGCCCCTGGCAAGGGACTGGAGTGGGTGGCCTTCATCAGAT |
| | | | ATGACGGCTCCAATAAGTACTATGCCGATTCTGTGAAGGGCAGGTTTAC |
| | | | CATCAGCCGCGACAACTCCAAGAATACACTGTACCTGCAGATGAACTCT |
| | | | CTGAGGGCCGAGGACACCGCCGTGTACTATTGCAAGACACACGGCAGC |
| | | | CACGATAATTGGGGCCAGGGCACCATGGTGACAGTGTCTTCCGGAGGA |
| | | | GGAGGCAGCATGAGCGGGCGGAGCGCCAACGCAGGGGGTGGAGGCTC |
| | | | CGGAGGAGGAGGCTCTCAGAGCGTGCTGACCCAGCCACCTTCCGTGTCT |
| | | | GGAGCCCCCGGACAGAGGGTGACAATCAGCTGTTCCGGCTCTCGCAGC |
| | | | AACATCGGCAGCAATACCGTGAAGTGGTATCAGCAGCTGCCAGGCACA |
| | | | GCCCCCAAGCTGCTGATCTACTATAATGACCAGCGGCCTTCCGGCGTGC |
| | | | CAGATAGATTCTCCGGCTCTAAGAGCGGCACCTCCGCCTCTCTGGCCAT |
| | | | CACAGGCCTGCAGGCAGAGGACGAGGCAGATTACTATTGTCAGAGCTA |
| | | | CGATAGATATACCCACCCCGCCCTGCTGTTTGGCACCGGCACAAAGGTG |
| | | | ACAGTGCTG |
| 327 | 24831 | full nt | GAGCCAAAGAGCTCCGACAAGACCCACACATGCCCCCCTTGTCCGGCG |
| | | | CCAGAGGCTGCAGGAGGACCAAGCGTGTTCCTGTTTCCACCCAAGCCTA |
| | | | AAGACACACTGATGATTTCCCGAACCCCCGAAGTCACATGCGTGGTCGT |
| | | | GTCTGTGAGTCACGAGGACCCTGAAGTCAAGTTCAACTGGTACGTGGAT |
| | | | GGCGTCGAGGTGCATAATGCCAAGACTAAACCTAGGGAGGAACAGTAC |
| | | | AACTCAACCTATCGCGTCGTGAGCGTCCTGACAGTGCTGCACCAGGATT |
| | | | GGCTGAACGGCAAAGAATATAAGTGCAAAGTGAGCAATAAGGCCCTGC |
| | | | CCGCTCCTATCGAGAAAACCATTTCCAAGGCTAAAGGGCAGCCTCGCG |
| | | | AACCTCAGGTGTACGTGTATCCACCCTCCCGCGATGAGCTGACAAAGAA |
| | | | CCAGGTGTCTCTGACCTGTCTGGTGAAGGGCTTTTACCCTAGCGACATC |
| | | | GCCGTGGAGTGGGAGTCCAATGGCCAGCCAGAGAACAATTATAAGACC |
| | | | ACACCTCCAGTGCTGGACTCTGATGGCAGCTTCGCCCTGGTGTCTAAGC |
| | | | TGACAGTGGACAAGAGCAGATGGCAGCAGGGCAACGTGTTTTCTTGTA |
| | | | GCGTGATGCACGAGGCCCTGCACAATCACTACACCCAGAAGTCCCTGA |
| | | | GCTTAAGCCCTGGAGGCAGCGCCGATGGAGGAATCTGGGAGCTGAAGA |
| | | | AGGACGTGTACGTGGTGGAGCTGGACTGGTATCCAGATGCACCAGGAG |
| | | | AGATGGTGGTGCTGACCTGCGACACACCAGAGGAGGATGGCATCACCT |
| | | | GGACACTGGATCAGAGCTCCGAGGTGCTGGGCTCCGGCAAGACCCTGA |
| | | | CAATCCAGGTGAAGGAGTTCGGCGACGCCGGACAGTACACCTGTCACA |
| | | | AGGGCGGCGAGGTGCTGTCCCACTCTCTGCTGCTGCTGCACAAGAAGG |
| | | | AGGACGGCATCTGGAGCACAGACATCCTGAAGGATCAGAAGGAGCCCA |
| | | | AGAACAAGACCTTCCTGAGGTGCGAGGCCAAGAATTATAGCGGCAGAT |
| | | | TCACCTGTTGGTGGCTGACCACAATCTCCACCGATCTGACATTTTCTGTG |
| | | | AAGTCTAGCAGGGGCTCCTCTGACCCTCAGGGAGTGACATGCGGAGCC |
| | | | GCCACCCTGAGCGCCGAGCGGGTGAGAGGCGATAACAAGGAGTACGAG |
| | | | TATTCCGTGGAGTGCCAGGAGGACGTGGCCTGTCCCACCGCCGAGGAG |
| | | | ACCCTGCCTATCGAAGTGATGGTGGATGCCGTGCACAAGCTGAAGTAC |
| | | | GAGAATTATACAAGCTCCTTCTTTATCAGGGACATCATCAAGCCCGATC |
| | | | CCCCTAAGAACCTGCAGCTGAAGCCTCTGAAGAATAGCCGCCAGGTGG |
| | | | AGGTGTCCTGGGAGTACCCTGACACCTGGAGCACACCACACTCCTATTT |
| | | | CTCTCTGACCTTTTGCGTGCAGGTGCAGGGCAAGTCTAAGAGGGAGAA |
| | | | GAAGGACCGCGTGTTCACCGATAAGACAAGCGCCACCGTGATCTGTCG |
| | | | GAAGAACGCCAGCATCTCCGTGCGGGCCCAGGATAGATACTATAACAG |
| | | | CTCCTGGAGCGAGTGGGCCTCCGTGCCATGTTCTGGAGGAGGAGGCAG |
| | | | CGGCGGAGGAGGCTCCGGCGGCGGCGGCTCTAATCTGCCAGTGGCCAC |
| | | | CCCTGACCCAGGCATGTTCCCCTGCCTGCACCACTCTCAGAACCTGCTG |
| | | | CGGGCCGTGAGCAATATGCTGCAGAAGGCCAGACAGACACTGGAGTTT |
| | | | TACCCATGTACCTCCGAGGAGATCGACCACGAGGATATCACAAAGGAT |
| | | | AAGACCTCTACAGTGGAGGCATGCCTGCCACTGGAGCTGACCAAGAAC |
| | | | GAGAGCTGTCTGAACAGCCGGGAGACATCTTTCATCACCAACGGCAGC |
| | | | TGCCTGGCCTCCAGAAAGACATCTTTTATGATGGCCCTGTGCCTGTCTA |
| | | | GCATCTACGAGGACCTGAAGATGTATCAGGTGGAGTTCAAGACCATGA |
| | | | ACGCCAAGCTGCTGATGGACCCTAAGAGGCAGATCTTTCTGGATCAGA |
| | | | ATATGCTGGCCGTGATCGACGAGCTGATGCAGGCCCTGAACTTCAATAG |
| | | | CGAGACAGTGCCACAGAAGTCCTCTCTGGAGGAGCCCGATTTCTACAA |
| | | | GACCAAGATCAAGCTGTGCATCCTGCTGCACGCCTTCCGGATCAGAGCC |
| | | | GTGACCATCGACCGCGTGATGAGCTACCTGAACGCCAGC |
| 328 | 24832 | full nt | GAGCCAAAGAGCTCCGACAAGACCCACACATGCCCCCCTTGTCCGGCG |
| | | | CCAGAGGCTGCAGGAGGACCAAGCGTGTTCCTGTTTCCACCCAAGCCTA |
| | | | AAGACACACTGATGATTTCCCGAACCCCCGAAGTCACATGCGTGGTCGT |
| | | | GTCTGTGAGTCACGAGGACCCTGAAGTCAAGTTCAACTGGTACGTGGAT |
| | | | GGCGTCGAGGTGCATAATGCCAAGACTAAACCTAGGGAGGAACAGTAC |
| | | | AACTCAACCTATCGCGTCGTGAGCGTCCTGACAGTGCTGCACCAGGATT |
| | | | GGCTGAACGGCAAAGAATATAAGTGCAAAGTGAGCAATAAGGCCCTGC |
| | | | CCGCTCCTATCGAGAAAACCATTTCCAAGGCTAAAGGGCAGCCTCGCG |
| | | | AACCTCAGGTGTACGTGTATCCACCCTCCCGCGATGAGCTGACAAAGAA |
| | | | CCAGGTGTCTCTGACCTGTCTGGTGAAGGGCTTTTACCCTAGCGACATC |
| | | | GCCGTGGAGTGGGAGTCCAATGGCCAGCCAGAGAACAATTATAAGACC |
| | | | ACACCTCCAGTGCTGGACTCTGATGGCAGCTTCGCCCTGGTGTCTAAGC |
| | | | TGACAGTGGACAAGAGCAGATGGCAGCAGGGCAACGTGTTTTCTTGTA |
| | | | GCGTGATGCACGAGGCCCTGCACAATCACTACACCCAGAAGTCCCTGA |
| | | | GCTTAAGCCCTGGAGGCAGCGCCGATGGAGGAATCTGGGAGCTGAAGA |
| | | | AGGACGTGTACGTGGTGGAGCTGGACTGGTATCCAGATGCACCAGGAG |
| | | | AGATGGTGGTGCTGACCTGCGACACACCAGAGGAGGATGGCATCACCT |
| | | | GGACACTGGATCAGAGCTCCGAGGTGCTGGGCTCCGGCAAGACCCTGA |
| | | | CAATCCAGGTGAAGGAGTTCGGCGACGCCGGACAGTACACCTGTCACA |
| | | | AGGGCGGCGAGGTGCTGTCCCACTCTCTGCTGCTGCTGCACAAGAAGG |
| | | | AGGACGGCATCTGGAGCACAGACATCCTGAAGGATCAGAAGGAGCCCA |
| | | | AGAACAAGACCTTCCTGAGGTGCGAGGCCAAGAATTATAGCGGCAGAT |
| | | | TCACCTGTTGGTGGCTGACCACAATCTCCACCGATCTGACATTTTCTGTG |
| | | | AAGTCTAGCAGGGGCTCCTCTGACCCTCAGGGAGTGACATGCGGAGCC |
| | | | GCCACCCTGAGCGCCGAGCGGGTGAGAGGCGATAACAAGGAGTACGAG |
| | | | TATTCCGTGGAGTGCCAGGAGGACTCTGCCTGTCCCGCCGCCGAGGAGT |
| | | | CCCTGCCTATCGAAGTGATGGTGGATGCCGTGCACAAGCTGAAGTACG |
| | | | AGAATTATACAAGCTCCTTCTTTATCAGGGACATCATCAAGCCCGATCC |
| | | | CCCTAAGAACCTGCAGCTGAAGCCTCTGAAGAATAGCCGCCAGGTGGA |
| | | | GGTGTCCTGGGAGTACCCTGACACCTGGAGCACACCACACTCCTATTTC |
| | | | TCTCTGACCTTTTGCGTGCAGGTGCAGGGCAAGTCTAAGAGGGAGAAG |
| | | | AAGGACCGCGTGTTCACCGATAAGACAAGCGCCACCGTGATCTGTCGG |
| | | | AAGAACGCCAGCATCTCCGTGCGGGCCCAGGATAGATACTATTCTAGCT |
| | | | CCTGGAGCGAGTGGGCCTCCGTGCCATGTTCTGGAGGAGGAGGCAGCG |
| | | | GCGGAGGAGGCTCCGGCGGCGGCGGCTCTAATCTGCCAGTGGCCACCC |
| | | | CTGACCCAGGCATGTTCCCCTGCCTGCACCACTCTCAGAACCTGCTGCG |
| | | | GGCCGTGAGCAATATGCTGCAGAAGGCCAGACAGACACTGGAGTTTTA |
| | | | CCCATGTACCTCCGAGGAGATCGACCACGAGGATATCACAAAGGATAA |
| | | | GACCTCTACAGTGGAGGCATGCCTGCCACTGGAGGCCACCAAGAACGA |
| | | | GAGCTGTCTGAACAGCCGGGAGACATCTTTCATCACCAACGGCAGCTGC |
| | | | CTGGCCTCCAGAAAGACATCTTTTATGATGGCCCTGTGCCTGTCTAGCA |
| | | | TCTACGAGGACCTGAAGATGTATCAGGTGGAGTTCAAGACCATGAACG |
| | | | CCAAGCTGCTGATGGACCCTAAGAGGCAGATCTTTCTGGATCAGAATAT |
| | | | GCTGGCCGTGATCGACGAGCTGATGCAGGCCCTGAACTTCAATAGCGA |
| | | | GACAGTGCCACAGAAGTCCTCTCTGGAGGAGCCCGATTTCTACAAGACC |
| | | | AAGATCAAGCTGTGCATCCTGCTGCACGCCTTCCGGATCAGAGCCGTGA |
| | | | CCATCGACCGCGTGATGAGCTACCTGAACGCCAGC |
| 329 | 24833 | full nt | GAGCCAAAGAGCTCCGACAAGACCCACACATGCCCCCCTTGTCCGGCG |
| | | | CCAGAGGCTGCAGGAGGACCAAGCGTGTTCCTGTTTCCACCCAAGCCTA |
| | | | AAGACACACTGATGATTTCCCGAACCCCCGAAGTCACATGCGTGGTCGT |
| | | | GTCTGTGAGTCACGAGGACCCTGAAGTCAAGTTCAACTGGTACGTGGAT |
| | | | GGCGTCGAGGTGCATAATGCCAAGACTAAACCTAGGGAGGAACAGTAC |
| | | | AACTCAACCTATCGCGTCGTGAGCGTCCTGACAGTGCTGCACCAGGATT |
| | | | GGCTGAACGGCAAAGAATATAAGTGCAAAGTGAGCAATAAGGCCCTGC |
| | | | CCGCTCCTATCGAGAAAACCATTTCCAAGGCTAAAGGGCAGCCTCGCG |
| | | | AACCTCAGGTGTACGTGTATCCACCCTCCCGCGATGAGCTGACAAAGAA |
| | | | CCAGGTGTCTCTGACCTGTCTGGTGAAGGGCTTTTACCCTAGCGACATC |
| | | | GCCGTGGAGTGGGAGTCCAATGGCCAGCCAGAGAACAATTATAAGACC |
| | | | ACACCTCCAGTGCTGGACTCTGATGGCAGCTTCGCCCTGGTGTCTAAGC |
| | | | TGACAGTGGACAAGAGCAGATGGCAGCAGGGCAACGTGTTTTCTTGTA |
| | | | GCGTGATGCACGAGGCCCTGCACAATCACTACACCCAGAAGTCCCTGA |
| | | | GCTTAAGCCCTGGAGGCAGCGCCGATGGAGGAATCTGGGAGCTGAAGA |
| | | | AGGACGTGTACGTGGTGGAGCTGGACTGGTATCCAGATGCACCAGGAG |
| | | | AGATGGTGGTGCTGACCTGCGACACACCAGAGGAGGATGGCATCACCT |
| | | | GGACACTGGATCAGAGCTCCGAGGTGCTGGGCTCCGGCAAGACCCTGA |
| | | | CAATCCAGGTGAAGGAGTTCGGCGACGCCGGACAGTACACCTGTCACA |
| | | | AGGGCGGCGAGGTGCTGTCCCACTCTCTGCTGCTGCTGCACAAGAAGG |
| | | | AGGACGGCATCTGGAGCACAGACATCCTGAAGGATCAGAAGGAGCCCA |
| | | | AGAACAAGACCTTCCTGAGGTGCGAGGCCAAGAATTATAGCGGCAGAT |
| | | | TCACCTGTTGGTGGCTGACCACAATCTCCACCGATCTGACATTTTCTGTG |
| | | | AAGTCTAGCAGGGGCTCCTCTGACCCTCAGGGAGTGACATGCGGAGCC |
| | | | GCCACCCTGAGCGCCGAGCGGGTGAGAGGCGATAACAAGGAGTACGAG |
| | | | TATTCCGTGGAGTGCCAGGAGGACTCTGCCTGTCCCGCCGCCGAGGAGT |
| | | | CCCTGCCTATCGAAGTGATGGTGGATGCCGTGCACAAGCTGAAGTACG |
| | | | AGAATTATACAAGCTCCTTCTTTATCAGGGACATCATCAAGCCCGATCC |
| | | | CCCTAAGAACCTGCAGCTGAAGCCTCTGAAGAATAGCCGCCAGGTGGA |
| | | | GGTGTCCTGGGAGTACCCTGACACCTGGAGCACACCACACTCCTATTTC |
| | | | TCTCTGACCTTTTGCGTGCAGGTGCAGGGCAAGTCTAAGAGGGAGAAG |
| | | | AAGGACCGCGTGTTCACCGATAAGACAAGCGCCACCGTGATCTGTCGG |
| | | | AAGAACGCCAGCATCTCCGTGCGGGCCCAGGATAGATACTATTCTAGCT |
| | | | CCTGGAGCGAGTGGGCCTCCGTGCCATGTTCTGGAGGAGGAGGCAGCG |
| | | | GCGGAGGAGGCTCCGGCGGCGGCGGCTCTAATCTGCCAGTGGCCACCC |
| | | | CTGACCCAGGCATGTTCCCCTGCCTGCACCACTCTCAGAACCTGCTGCG |
| | | | GGCCGTGAGCAATATGCTGCAGAAGGCCAGACAGACACTGGAGTTTTA |
| | | | CCCATGTACCTCCGAGGAGATCGACCACGAGGATATCACAAAGGATAA |
| | | | GACCTCTACAGTGGAGGCATGCCTGCCACTGGAGCTGACCAAGAACGA |
| | | | GAGCTGTCTGAACAGCCGGGAGACATCTTTCATCACCAACGGCAGCTGC |
| | | | CTGGCCTCCAGAAAGACATCTTTTATGATGGCCCTGTGCCTGTCTAGCA |
| | | | TCTACGAGGACCTGAAGATGTATCAGGTGGAGTTCAAGACCATGAACG |
| | | | CCAAGCTGCTGATGGACCCTAAGAGGCAGATCTTTCTGGATCAGAATAT |
| | | | GCTGGCCGTGATCGACGAGCTGATGCAGGCCCTGAACTTCAATAGCGA |
| | | | GACAGTGCCACAGAAGTCCTCTCTGGAGGAGCCCGATTTCTACAAGACC |
| | | | AAGATCAAGCTGTGCATCCTGCTGCACGCCTTCGCCATCAGAGCCGTGA |
| | | | CCATCGACCGCGTGATGAGCTACCTGAACGCCAGC |
| 330 | 24834 | full nt | GAGCCAAAGAGCTCCGACAAGACCCACACATGCCCCCCTTGTCCGGCG |
| | | | CCAGAGGCTGCAGGAGGACCAAGCGTGTTCCTGTTTCCACCCAAGCCTA |
| | | | AAGACACACTGATGATTTCCCGAACCCCCGAAGTCACATGCGTGGTCGT |
| | | | GTCTGTGAGTCACGAGGACCCTGAAGTCAAGTTCAACTGGTACGTGGAT |
| | | | GGCGTCGAGGTGCATAATGCCAAGACTAAACCTAGGGAGGAACAGTAC |
| | | | AACTCAACCTATCGCGTCGTGAGCGTCCTGACAGTGCTGCACCAGGATT |
| | | | GGCTGAACGGCAAAGAATATAAGTGCAAAGTGAGCAATAAGGCCCTGC |
| | | | CCGCTCCTATCGAGAAAACCATTTCCAAGGCTAAAGGGCAGCCTCGCG |
| | | | AACCTCAGGTGTACGTGTATCCACCCTCCCGCGATGAGCTGACAAAGAA |
| | | | CCAGGTGTCTCTGACCTGTCTGGTGAAGGGCTTTTACCCTAGCGACATC |
| | | | GCCGTGGAGTGGGAGTCCAATGGCCAGCCAGAGAACAATTATAAGACC |
| | | | ACACCTCCAGTGCTGGACTCTGATGGCAGCTTCGCCCTGGTGTCTAAGC |
| | | | TGACAGTGGACAAGAGCAGATGGCAGCAGGGCAACGTGTTTTCTTGTA |
| | | | GCGTGATGCACGAGGCCCTGCACAATCACTACACCCAGAAGTCCCTGA |
| | | | GCTTAAGCCCTGGAGGCAGCGCCGATGGAGGAATCTGGGAGCTGAAGA |
| | | | AGGACGTGTACGTGGTGGAGCTGGACTGGTATCCAGATGCACCAGGAG |
| | | | AGATGGTGGTGCTGACCTGCGACACACCAGAGGAGGATGGCATCACCT |
| | | | GGACACTGGATCAGAGCTCCGAGGTGCTGGGCTCCGGCAAGACCCTGA |
| | | | CAATCCAGGTGAAGGAGTTCGGCGACGCCGGACAGTACACCTGTCACA |
| | | | AGGGCGGCGAGGTGCTGTCCCACTCTCTGCTGCTGCTGCACAAGAAGG |
| | | | AGGACGGCATCTGGAGCACAGACATCCTGAAGGATCAGAAGGAGCCCA |
| | | | AGAACAAGACCTTCCTGAGGTGCGAGGCCAAGAATTATAGCGGCAGAT |
| | | | TCACCTGTTGGTGGCTGACCACAATCTCCACCGATCTGACATTTTCTGTG |
| | | | AAGTCTAGCAGGGGCTCCTCTGACCCTCAGGGAGTGACATGCGGAGCC |
| | | | GCCACCCTGAGCGCCGAGCGGGTGAGAGGCGATAACAAGGAGTACGAG |
| | | | TATTCCGTGGAGTGCCAGGAGGACTCTGCCTGTCCCGCCGCCGAGGAGT |
| | | | CCCTGCCTATCGAAGTGATGGTGGATGCCGTGCACAAGCTGAAGTACG |
| | | | AGAATTATACAAGCTCCTTCTTTATCAGGGACATCATCAAGCCCGATCC |
| | | | CCCTAAGAACCTGCAGCTGAAGCCTCTGAAGAATAGCCGCCAGGTGGA |
| | | | GGTGTCCTGGGAGTACCCTGACACCTGGAGCACACCACACTCCTATTTC |
| | | | TCTCTGACCTTTTGCGTGCAGGTGCAGGGCAAGTCTAAGAGGGAGAAG |
| | | | AAGGACCGCGTGTTCACCGATAAGACAAGCGCCACCGTGATCTGTCGG |
| | | | AAGAACGCCAGCATCTCCGTGCGGGCCCAGGATAGATACTATTCTAGCT |
| | | | CCTGGAGCGAGTGGGCCTCCGTGCCATGTTCTGGAGGAGGAGGCAGCG |
| | | | GCGGAGGAGGCTCCGGCGGCGGCGGCTCTAATCTGCCAGTGGCCACCC |
| | | | CTGACCCAGGCATGTTCCCCTGCCTGCACCACTCTCAGAACCTGCTGCG |
| | | | GGCCGTGAGCAATATGCTGCAGAAGGCCAGACAGACACTGGAGTTTTA |
| | | | CCCATGTACCTCCGAGGAGATCGACCACGAGGATATCACAAAGGATAA |
| | | | GACCTCTACAGTGGAGGCATGCCTGCCACTGGAGCTGACCAAGAACGA |
| | | | GAGCTGTCTGAACAGCCGGGAGACATCTTTCATCACCAACGGCAGCTGC |
| | | | CTGGCCTCCAGAAAGACATCTTTTATGATGGCCCTGTGCCTGTCTAGCA |
| | | | TCTACGAGGACCTGAAGATGTATCAGGTGGAGTTCAAGACCATGAACG |
| | | | CCAAGCTGCTGATGGACCCTAAGAGGCAGATCTTTCTGGATCAGAATAT |
| | | | GCTGGCCGTGATCGACGAGCTGATGCAGGCCCTGAACTTCAATAGCGA |
| | | | GACAGTGCCACAGAAGTCCTCTCTGGAGGAGCCCGATTTCTACAAGACC |
| | | | AAGATCAAGCTGTGCATCCTGCTGCACGCCTTCCGGATCAGAGCCGCCA |
| | | | CCATCGACCGCGTGATGAGCTACCTGAACGCCAGC |
| 331 | 24835 | full nt | GAGCCAAAGAGCTCCGACAAGACCCACACATGCCCCCCTTGTCCGGCG |
| | | | CCAGAGGCTGCAGGAGGACCAAGCGTGTTCCTGTTTCCACCCAAGCCTA |
| | | | AAGACACACTGATGATTTCCCGAACCCCCGAAGTCACATGCGTGGTCGT |
| | | | GTCTGTGAGTCACGAGGACCCTGAAGTCAAGTTCAACTGGTACGTGGAT |
| | | | GGCGTCGAGGTGCATAATGCCAAGACTAAACCTAGGGAGGAACAGTAC |
| | | | AACTCAACCTATCGCGTCGTGAGCGTCCTGACAGTGCTGCACCAGGATT |
| | | | GGCTGAACGGCAAAGAATATAAGTGCAAAGTGAGCAATAAGGCCCTGC |
| | | | CCGCTCCTATCGAGAAAACCATTTCCAAGGCTAAAGGGCAGCCTCGCG |
| | | | AACCACAGGTGTACGTGTATCCCCCTTCCCGGGACGAGCTGACCAAGA |
| | | | ACCAGGTGTCTCTGACATGCCTGGTGAAGGGCTTCTACCCCAGCGATAT |
| | | | CGCCGTGGAGTGGGAGTCCAATGGCCAGCCTGAGAACAATTATAAGAC |
| | | | CACACCACCCGTGCTGGACAGCGATGGCTCCTTCGCCCTGGTGTCCAAG |
| | | | CTGACCGTGGACAAGTCTAGGTGGCAGCAGGGCAACGTGTTTTCTTGCA |
| | | | GCGTGATGCACGAGGCCCTGCACAATCACTACACCCAGAAGTCCCTGA |
| | | | GCTTAAGCCCAGGAGGCAGCGCCGATGGAGGAATCTGGGAGCTGAAGA |
| | | | AGGACGTGTACGTGGTGGAGCTGGACTGGTACCCGGATGCCCCAGGCG |
| | | | AGATGGTGGTGCTGACCTGCGACACACCTGAGGAGGATGGCATCACCT |
| | | | GGACACTGGATCAGAGCTCCGAGGTGCTGGGCTCCGGCAAGACCCTGA |
| | | | CAATCCAGGTGAAGGAGTTCGGCGACGCCGGACAGTACACATGTCACA |
| | | | AGGGAGGAGAGGTGCTGAGCCACTCCCTGCTGCTGCTGCACAAGAAGG |
| | | | AGGACGGCATCTGGAGCACAGACATCCTGAAGGATCAGAAGGAGCCAA |
| | | | AGAACAAGACCTTCCTGCGGTGCGAGGCCAAGAATTATAGCGGCAGAT |
| | | | TCACCTGTTGGTGGCTGACCACAATCAGCACCGATCTGACATTTTCCGT |
| | | | GAAGTCTAGCAGGGGCTCCTCTGACCCCCAGGGAGTGACATGCGGAGC |
| | | | CGCCACCCTGAGCGCCGAGCGGGTGAGAGGCGATAACAAGGAGTACGA |
| | | | GTATTCCGTGGAGTGCCAGGAGGACTCTGCCTGTCCAGCCGCCGAGGA |
| | | | GTCCCTGCCAATCGAAGTGATGGTGGATGCCGTGCACAAGCTGAAGTA |
| | | | CGAGAATTATACAAGCTCCTTCTTTATCAGGGACATCATCAAGCCCGAT |
| | | | CCCCCTAAGAACCTGCAGCTGAAGCCCCTGAAGAACAGCAGACAGGTG |
| | | | GAGGTGAGCTGGGAGTACCCCGACACCTGGAGCACACCTCACTCCTATT |
| | | | TCTCTCTGACCTTTTGCGTGCAGGTGCAGGGCAAGTCTAAGAGGGAGAA |
| | | | GAAGGACCGCGTGTTCACCGATAAGACAAGCGCCACCGTGATCTGTAG |
| | | | AAAGAACGCCTCTATCAGCGTGCGGGCACAGGACCGGTACTACAGCTC |
| | | | CTCTTGGTCCGAGTGGGCCTCTGTGCCATGCAGCGGAGGAGGAGGCTCC |
| | | | GGAGGAGGAGGCTCTGGCGGCGGCGGCAGCAACCTGCCTGTGGCCACC |
| | | | CCCGATCCTGGCATGTTCCCATGCCTGCACCACAGCCAGAACCTGCTGC |
| | | | GGGCCGTGTCCAATATGCTGCAGAAGGCCAGGCAGACCCTGCGCTTTTA |
| | | | TCCCTGTACATCTGAGGAGATCGACCACGAGGATATCACCAAGGACAA |
| | | | GACCAGCACAGTGGAGGCCTGCCTGCCTCTGGAGCTGACAAAGAACGA |
| | | | GTCCTGTCTGAACAGCCGGGAGACCAGCTTCATCACAAATGGCTCCTGC |
| | | | CTGGCCTCTAGAAAGACCAGCTTTATGATGGCCCTGTGCCTGAGCTCCA |
| | | | TCTACGAGGATCTGAAGATGTATCAGGTGGAGTTCAAGACAATGAACG |
| | | | CCAAGCTGCTGATGGACCCCGAGAGGCAGATCTTTCTGGATCAGAATAT |
| | | | GCTGGCCGTGATCGACGAGCTGATGCAGGCCCTGAACTTCAATTCCGAG |
| | | | ACCGTGCCACAGAAGTCTAGCCTGGAGGAGCCCGATTTCTACGAGACA |
| | | | AAGATCAAGCTGTGCATCCTGCTGCACGCCTTTCGGATCAGAGCCGTGA |
| | | | CAATCGACCGCGTGATGTCCTATCTGAACGCCTCT |
| 332 | 24836 | full nt | GAGCCAAAGAGCTCCGACAAGACCCACACATGCCCCCCTTGTCCGGCG |
| | | | CCAGAGGCTGCAGGAGGACCAAGCGTGTTCCTGTTTCCACCCAAGCCTA |
| | | | AAGACACACTGATGATTTCCCGAACCCCCGAAGTCACATGCGTGGTCGT |
| | | | GTCTGTGAGTCACGAGGACCCTGAAGTCAAGTTCAACTGGTACGTGGAT |
| | | | GGCGTCGAGGTGCATAATGCCAAGACTAAACCTAGGGAGGAACAGTAC |
| | | | AACTCAACCTATCGCGTCGTGAGCGTCCTGACAGTGCTGCACCAGGATT |
| | | | GGCTGAACGGCAAAGAATATAAGTGCAAAGTGAGCAATAAGGCCCTGC |
| | | | CCGCTCCTATCGAGAAAACCATTTCCAAGGCTAAAGGGCAGCCTCGCG |
| | | | AACCTCAGGTGTACGTGTATCCACCCTCCCGCGATGAGCTGACAAAGAA |
| | | | CCAGGTGTCTCTGACCTGTCTGGTGAAGGGCTTTTACCCTAGCGACATC |
| | | | GCCGTGGAGTGGGAGTCCAATGGCCAGCCAGAGAACAATTATAAGACC |
| | | | ACACCTCCAGTGCTGGACTCTGATGGCAGCTTCGCCCTGGTGTCTAAGC |
| | | | TGACAGTGGACAAGAGCAGATGGCAGCAGGGCAACGTGTTTTCTTGTA |
| | | | GCGTGATGCACGAGGCCCTGCACAATCACTACACCCAGAAGTCCCTGA |
| | | | GCTTAAGCCCTGGAGGCAGCGCCGATGGAGGAATCTGGGAGCTGAAGA |
| | | | AGGACGTGTACGTGGTGGAGCTGGACTGGTATCCAGATGCACCAGGAG |
| | | | AGATGGTGGTGCTGACCTGCGACACACCAGAGGAGGATGGCATCACCT |
| | | | GGACACTGGATCAGAGCTCCGAGGTGCTGGGCTCCGGCAAGACCCTGA |
| | | | CAATCCAGGTGAAGGAGTTCGGCGACGCCGGACAGTACACCTGTCACA |
| | | | AGGGCGGCGAGGTGCTGTCCCACTCTCTGCTGCTGCTGCACAAGAAGG |
| | | | AGGACGGCATCTGGAGCACAGACATCCTGAAGGATCAGAAGGAGCCCA |
| | | | AGAACAAGACCTTCCTGAGGTGCGAGGCCAAGAATTATAGCGGCAGAT |
| | | | TCACCTGTTGGTGGCTGACCACAATCTCCACCGATCTGACATTTTCTGTG |
| | | | AAGTCTAGCAGGGGCTCCTCTGACCCTCAGGGAGTGACATGCGGAGCC |
| | | | GCCACCCTGAGCGCCGAGCGGGTGAGAGGCGATAACAAGGAGTACGAG |
| | | | TATTCCGTGGAGTGCCAGGAGGACTCTGCCTGTCCCGCCGCCGAGGAGT |
| | | | CCCTGCCTATCGAAGTGATGGTGGATGCCGTGCACAAGCTGAAGTACG |
| | | | AGAATTATACAAGCTCCTTCTTTATCAGGGACATCATCAAGCCCGATCC |
| | | | CCCTAAGAACCTGCAGCTGAAGCCTCTGAAGAATAGCCGCCAGGTGGA |
| | | | GGTGTCCTGGGAGTACCCTGACACCTGGAGCACACCACACTCCTATTTC |
| | | | TCTCTGACCTTTTGCGTGCAGGTGCAGGGCAAGTCTAAGAGGGAGAAG |
| | | | AAGGACCGCGTGTTCACCGATAAGACAAGCGCCACCGTGATCTGTCGG |
| | | | AAGAACGCCAGCATCTCCGTGCGGGCCCAGGATAGATACTATTCTAGCT |
| | | | CCTGGAGCGAGTGGGCCTCCGTGCCATGTTCTGGAGGAGGAGGCAGCG |
| | | | GCGGAGGAGGCTCCGGCGGCGGCGGCTCTAATCTGCCAGTGGCCACCC |
| | | | CTGACCCAGGCATGTTCCCCTGCCTGCACCACTCTCAGAACCTGCTGCG |
| | | | GGCCGTGAGCAATATGCTGCAGAAGGCCAGACAGACACTGGAGTTTTA |
| | | | CAGCTGTACCTCCGAGGAGATCGACCACGAGGATATCACAAAGGATAA |
| | | | GACCTCTACAGTGGAGGCATGCCTGCCACTGGAGCTGACCAAGAACGA |
| | | | GAGCTGTCTGAACAGCCGGGAGACATCTTTCATCACCAACGGCAGCTGC |
| | | | CTGGCCTCCAGAAAGACATCTTTTATGATGGCCCTGTGCCTGTCTAGCA |
| | | | TCTACGAGGACCTGAAGATGTATCAGGTGGAGTTCAAGACCATGAACG |
| | | | CCAAGCTGCTGATGGACCCTAAGAGGCAGATCTTTCTGGATCAGAATAT |
| | | | GCTGGCCGTGATCGACGAGCTGATGCAGGCCCTGAACTTCAATAGCGA |
| | | | GACAGTGCCACAGAAGTCCTCTCTGGAGGAGCCCGATTTCTACAAGACC |
| | | | AAGCAGAAGCTGTGCAGCCTGCTGCACGCCTTCCGGATCAGAGCCGTG |
| | | | ACCATCGACCGCGTGATGAGCTACCTGAACGCCAGC |
| 333 | 24837 | full nt | GAGCCAAAGAGCTCCGACAAGACCCACACATGCCCCCCTTGTCCGGCG |
| | | | CCAGAGGCTGCAGGAGGACCAAGCGTGTTCCTGTTTCCACCCAAGCCTA |
| | | | AAGACACACTGATGATTTCCCGAACCCCCGAAGTCACATGCGTGGTCGT |
| | | | GTCTGTGAGTCACGAGGACCCTGAAGTCAAGTTCAACTGGTACGTGGAT |
| | | | GGCGTCGAGGTGCATAATGCCAAGACTAAACCTAGGGAGGAACAGTAC |
| | | | AACTCAACCTATCGCGTCGTGAGCGTCCTGACAGTGCTGCACCAGGATT |
| | | | GGCTGAACGGCAAAGAATATAAGTGCAAAGTGAGCAATAAGGCCCTGC |
| | | | CCGCTCCTATCGAGAAAACCATTTCCAAGGCTAAAGGGCAGCCTCGCG |
| | | | AACCTCAGGTGTACGTGTATCCACCCTCCCGCGATGAGCTGACAAAGAA |
| | | | CCAGGTGTCTCTGACCTGTCTGGTGAAGGGCTTTTACCCTAGCGACATC |
| | | | GCCGTGGAGTGGGAGTCCAATGGCCAGCCAGAGAACAATTATAAGACC |
| | | | ACACCTCCAGTGCTGGACTCTGATGGCAGCTTCGCCCTGGTGTCTAAGC |
| | | | TGACAGTGGACAAGAGCAGATGGCAGCAGGGCAACGTGTTTTCTTGTA |
| | | | GCGTGATGCACGAGGCCCTGCACAATCACTACACCCAGAAGTCCCTGA |
| | | | GCTTAAGCCCTGGAGGCAGCGCCGATGGAGGAATCTGGGAGCTGAAGA |
| | | | AGGACGTGTACGTGGTGGAGCTGGACTGGTATCCAGATGCACCAGGAG |
| | | | AGATGGTGGTGCTGACCTGCGACACACCAGAGGAGGATGGCATCACCT |
| | | | GGACACTGGATCAGAGCTCCGAGGTGCTGGGCTCCGGCAAGACCCTGA |
| | | | CAATCCAGGTGAAGGAGTTCGGCGACGCCGGACAGTACACCTGTCACA |
| | | | AGGGCGGCGAGGTGCTGTCCCACTCTCTGCTGCTGCTGCACAAGAAGG |
| | | | AGGACGGCATCTGGAGCACAGACATCCTGAAGGATCAGAAGGAGCCCA |
| | | | AGAACAAGACCTTCCTGAGGTGCGAGGCCAAGAATTATAGCGGCAGAT |
| | | | TCACCTGTTGGTGGCTGACCACAATCTCCACCGATCTGACATTTTCTGTG |
| | | | AAGTCTAGCAGGGGCTCCTCTGACCCTCAGGGAGTGACATGCGGAGCC |
| | | | GCCACCCTGAGCGCCGAGCGGGTGAGAGGCGATAACAAGGAGTACGAG |
| | | | TATTCCGTGGAGTGCCAGGAGGACTCTGCCTGTCCCGCCGCCGAGGAGT |
| | | | CCCTGCCTATCGAAGTGATGGTGGATGCCGTGCACAAGCTGAAGTACG |
| | | | AGAATTATACAAGCTCCTTCTTTATCAGGGACATCATCAAGCCCGATCC |
| | | | CCCTAAGAACCTGCAGCTGAAGCCTCTGAAGAATAGCCGCCAGGTGGA |
| | | | GGTGTCCTGGGAGTACCCTGACACCTGGAGCACACCACACTCCTATTTC |
| | | | TCTCTGACCTTTTGCGTGCAGGTGCAGGGCAAGTCTAAGAGGGAGAAG |
| | | | AAGGACCGCGTGTTCACCGATAAGACAAGCGCCACCGTGATCTGTCGG |
| | | | AAGAACGCCAGCATCTCCGTGCGGGCCCAGGATAGATACTATTCTAGCT |
| | | | CCTGGAGCGAGTGGGCCTCCGTGCCATGTTCTGGAGGAGGAGGCAGCG |
| | | | GCGGAGGAGGCTCCGGCGGCGGCGGCTCTAATCTGCCAGTGGCCACCC |
| | | | CTGACCCAGGCATGTTCCCCTGCCTGCACCACTCTCAGAACCTGCTGCG |
| | | | GGCCGTGAGCAATATGCTGCAGAAGGCCAGACAGACACTGGAGAGCAG |
| | | | CCCATGTACCTCCGAGGAGATCGACCACGAGGATATCACAAAGGATAA |
| | | | GACCTCTACAGTGGAGGCATGCCTGCCACTGGAGCTGACCAAGAACGA |
| | | | GAGCTGTCTGAACAGCCGGGAGACATCTTTCATCACCAACGGCAGCTGC |
| | | | CTGGCCTCCAGAAAGACATCTTTTATGATGGCCCTGTGCCTGTCTAGCA |
| | | | TCTACGAGGACCTGAAGATGTATCAGGTGGAGTTCAAGACCATGAACG |
| | | | CCAAGCTGCTGATGGACCCTAAGAGGCAGATCTTTCTGGATCAGAATAT |
| | | | GCTGGCCGTGATCGACGAGCTGATGCAGGCCCTGAACTTCAATAGCGA |
| | | | GACAGTGCCACAGAAGTCCTCTCTGGAGGAGCCCGATTTCAGCAAGAC |
| | | | CAAGATCAAGCTGTGCATCCTGCTGCACGCCTTCCGGATCAGAGCCGTG |
| | | | ACCATCGACCGCGTGATGAGCTACCTGAACGCCAGC |
| 334 | 24838 | full nt | GAGCCAAAGAGCTCCGACAAGACCCACACATGCCCCCCTTGTCCGGCG |
| | | | CCAGAGGCTGCAGGAGGACCAAGCGTGTTCCTGTTTCCACCCAAGCCTA |
| | | | AAGACACACTGATGATTTCCCGAACCCCCGAAGTCACATGCGTGGTCGT |
| | | | GTCTGTGAGTCACGAGGACCCTGAAGTCAAGTTCAACTGGTACGTGGAT |
| | | | GGCGTCGAGGTGCATAATGCCAAGACTAAACCTAGGGAGGAACAGTAC |
| | | | AACTCAACCTATCGCGTCGTGAGCGTCCTGACAGTGCTGCACCAGGATT |
| | | | GGCTGAACGGCAAAGAATATAAGTGCAAAGTGAGCAATAAGGCCCTGC |
| | | | CCGCTCCTATCGAGAAAACCATTTCCAAGGCTAAAGGGCAGCCTCGCG |
| | | | AACCTCAGGTGTACGTGTATCCACCCTCCCGCGATGAGCTGACAAAGAA |
| | | | CCAGGTGTCTCTGACCTGTCTGGTGAAGGGCTTTTACCCTAGCGACATC |
| | | | GCCGTGGAGTGGGAGTCCAATGGCCAGCCAGAGAACAATTATAAGACC |
| | | | ACACCTCCAGTGCTGGACTCTGATGGCAGCTTCGCCCTGGTGTCTAAGC |
| | | | TGACAGTGGACAAGAGCAGATGGCAGCAGGGCAACGTGTTTTCTTGTA |
| | | | GCGTGATGCACGAGGCCCTGCACAATCACTACACCCAGAAGTCCCTGA |
| | | | GCTTAAGCCCTGGAGGCAGCGCCGATGGAGGAATCTGGGAGCTGAAGA |
| | | | AGGACGTGTACGTGGTGGAGCTGGACTGGTATCCAGATGCACCAGGAG |
| | | | AGATGGTGGTGCTGACCTGCGACACACCAGAGGAGGATGGCATCACCT |
| | | | GGACACTGGATCAGAGCTCCGAGGTGCTGGGCTCCGGCAAGACCCTGA |
| | | | CAATCCAGGTGAAGGAGTTCGGCGACGCCGGACAGTACACCTGTCACA |
| | | | AGGGCGGCGAGGTGCTGTCCCACTCTCTGCTGCTGCTGCACAAGAAGG |
| | | | AGGACGGCATCTGGAGCACAGACATCCTGAAGGATCAGAAGGAGCCCA |
| | | | AGAACAAGACCTTCCTGAGGTGCGAGGCCAAGAATTATAGCGGCAGAT |
| | | | TCACCTGTTGGTGGCTGACCACAATCTCCACCGATCTGACATTTTCTGTG |
| | | | AAGTCTAGCAGGGGCTCCTCTGACCCTCAGGGAGTGACATGCGGAGCC |
| | | | GCCACCCTGAGCGCCGAGCGGGTGAGAGGCGATAACAAGGAGTACGAG |
| | | | TATTCCGTGGAGTGCCAGGAGGACTCTGCCTGTCCCGCCGCCGAGGAGT |
| | | | CCCTGCCTATCGAAGTGATGGTGGATGCCGTGCACAAGCTGAAGTACG |
| | | | AGAATTATACAAGCTCCTTCTTTATCAGGGACATCATCAAGCCCGATCC |
| | | | CCCTAAGAACCTGCAGCTGAAGCCTCTGAAGAATAGCCGCCAGGTGGA |
| | | | GGTGTCCTGGGAGTACCCTGACACCTGGAGCACACCACACTCCTATTTC |
| | | | TCTCTGACCTTTTGCGTGCAGGTGCAGGGCAAGTCTAAGAGGGAGAAG |
| | | | AAGGACCGCGTGTTCACCGATAAGACAAGCGCCACCGTGATCTGTCGG |
| | | | AAGAACGCCAGCATCTCCGTGCGGGCCCAGGATAGATACTATTCTAGCT |
| | | | CCTGGAGCGAGTGGGCCTCCGTGCCATGTTCTGGAGGAGGAGGCAGCG |
| | | | GCGGAGGAGGCTCCGGCGGCGGCGGCTCTAATCTGCCAGTGGCCACCC |
| | | | CTGACCCAGGCATGTTCCCCTGCCTGCACCACTCTCAGAACCTGCTGCG |
| | | | GGCCGTGAGCAATATGCTGCAGAAGGCCAGACAGACACTGGAGTTTTA |
| | | | CCCATGTGCCTCCAGAGAGAGCAGACACGAGGATATCACAAAGGATAA |
| | | | GACCTCTACAGTGGAGGCATGCCTGCCACTGGAGCTGACCAAGAACGA |
| | | | GAGCTGTCTGAACAGCCGGGAGACATCTTTCATCACCAACGGCAGCTGC |
| | | | CTGGCCTCCAGAAAGACATCTTTTATGATGGCCCTGTGCCTGTCTAGCA |
| | | | TCTACGAGGACCTGAAGATGTATCAGGTGGAGTTCAAGACCATGAACG |
| | | | CCAAGCTGCTGATGGACCCTAAGAGGCAGATCTTTCTGGATCAGAATAT |
| | | | GCTGGCCGTGATCGACGAGCTGATGCAGGCCCTGAACTTCAATAGCGA |
| | | | GACAGTGCCACAGAAGTCCTCTCTGGAGGAGCCCGATTTCTACAAGACC |
| | | | AAGATCAAGCTGTGCATCCTGCTGCACGCCTTCCGGATCAGAGCCGTGA |
| | | | CCATCGACCGCGTGATGAGCTACCTGAACGCCAGC |
| 335 | 24839 | full nt | GAGCCAAAGAGCTCCGACAAGACCCACACATGCCCCCCTTGTCCGGCG |
| | | | CCAGAGGCTGCAGGAGGACCAAGCGTGTTCCTGTTTCCACCCAAGCCTA |
| | | | AAGACACACTGATGATTTCCCGAACCCCCGAAGTCACATGCGTGGTCGT |
| | | | GTCTGTGAGTCACGAGGACCCTGAAGTCAAGTTCAACTGGTACGTGGAT |
| | | | GGCGTCGAGGTGCATAATGCCAAGACTAAACCTAGGGAGGAACAGTAC |
| | | | AACTCAACCTATCGCGTCGTGAGCGTCCTGACAGTGCTGCACCAGGATT |
| | | | GGCTGAACGGCAAAGAATATAAGTGCAAAGTGAGCAATAAGGCCCTGC |
| | | | CCGCTCCTATCGAGAAAACCATTTCCAAGGCTAAAGGGCAGCCTCGCG |
| | | | AACCTCAGGTGTACGTGTATCCACCCTCCCGCGATGAGCTGACAAAGAA |
| | | | CCAGGTGTCTCTGACCTGTCTGGTGAAGGGCTTTTACCCTAGCGACATC |
| | | | GCCGTGGAGTGGGAGTCCAATGGCCAGCCAGAGAACAATTATAAGACC |
| | | | ACACCTCCAGTGCTGGACTCTGATGGCAGCTTCGCCCTGGTGTCTAAGC |
| | | | TGACAGTGGACAAGAGCAGATGGCAGCAGGGCAACGTGTTTTCTTGTA |
| | | | GCGTGATGCACGAGGCCCTGCACAATCACTACACCCAGAAGTCCCTGA |
| | | | GCTTAAGCCCTGGAGGCAGCGCCGATGGAGGAATCTGGGAGCTGAAGA |
| | | | AGGACGTGTACGTGGTGGAGCTGGACTGGTATCCAGATGCACCAGGAG |
| | | | AGATGGTGGTGCTGACCTGCGACACACCAGAGGAGGATGGCATCACCT |
| | | | GGACACTGGATCAGAGCTCCGAGGTGCTGGGCTCCGGCAAGACCCTGA |
| | | | CAATCCAGGTGAAGGAGTTCGGCGACGCCGGACAGTACACCTGTCACA |
| | | | AGGGCGGCGAGGTGCTGTCCCACTCTCTGCTGCTGCTGCACAAGAAGG |
| | | | AGGACGGCATCTGGAGCACAGACATCCTGAAGGATCAGAAGGAGCCCA |
| | | | AGAACAAGACCTTCCTGAGGTGCGAGGCCAAGAATTATAGCGGCAGAT |
| | | | TCACCTGTTGGTGGCTGACCACAATCTCCACCGATCTGACATTTTCTGTG |
| | | | AAGTCTAGCAGGGGCTCCTCTGACCCTCAGGGAGTGACATGCGGAGCC |
| | | | GCCACCCTGAGCGCCGAGCGGGTGAGAGGCGATAACAAGGAGTACGAG |
| | | | TATTCCGTGGAGTGCCAGGAGGACTCTGCCTGTCCCGCCGCCGAGGAGT |
| | | | CCCTGCCTATCGAAGTGATGGTGGATGCCGTGCACAAGCTGAAGTACG |
| | | | AGAATTATACAAGCTCCTTCTTTATCAGGGACATCATCAAGCCCGATCC |
| | | | CCCTAAGAACCTGCAGCTGAAGCCTCTGAAGAATAGCCGCCAGGTGGA |
| | | | GGTGTCCTGGGAGTACCCTGACACCTGGAGCACACCACACTCCTATTTC |
| | | | TCTCTGACCTTTTGCGTGCAGGTGCAGGGCAAGTCTAAGAGGGAGAAG |
| | | | AAGGACCGCGTGTTCACCGATAAGACAAGCGCCACCGTGATCTGTCGG |
| | | | AAGAACGCCAGCATCTCCGTGCGGGCCCAGGATAGATACTATTCTAGCT |
| | | | CCTGGAGCGAGTGGGCCTCCGTGCCATGTTCTGGAGGAGGAGGCAGCG |
| | | | GCGGAGGAGGCTCCGGCGGCGGCGGCTCTAATCTGCCAGTGGCCACCC |
| | | | CTGACCCAGGCATGTTCCCCTGCCTGCACCACTCTCAGAACCTGCTGCG |
| | | | GGCCGTGAGCAATATGCTGCAGAAGGCCAGACAGACACTGGAGTTTTA |
| | | | CCCATGTGCCTCCAGAAAGAGCAGACACAAGGATATCACAAAGGATAA |
| | | | GACCTCTACAGTGGAGGCATGCCTGCCACTGGAGCTGACCAAGAACGA |
| | | | GAGCTGTCTGAACAGCCGGGAGACATCTTTCATCACCAACGGCAGCTGC |
| | | | CTGGCCTCCAGAAAGACATCTTTTATGATGGCCCTGTGCCTGTCTAGCA |
| | | | TCTACGAGGACCTGAAGATGTATCAGGTGGAGTTCAAGACCATGAACG |
| | | | CCAAGCTGCTGATGGACCCTAAGAGGCAGATCTTTCTGGATCAGAATAT |
| | | | GCTGGCCGTGATCGACGAGCTGATGCAGGCCCTGAACTTCAATAGCGA |
| | | | GACAGTGCCACAGAAGTCCTCTCTGGAGGAGCCCGATTTCTACAAGACC |
| | | | AAGATCAAGCTGTGCATCCTGCTGCACGCCTTCCGGATCAGAGCCGTGA |
| | | | CCATCGACCGCGTGATGAGCTACCTGAACGCCAGC |
| 336 | 24840 | full nt | GAGCCAAAGAGCTCCGACAAGACCCACACATGCCCCCCTTGTCCGGCG |
| | | | CCAGAGGCTGCAGGAGGACCAAGCGTGTTCCTGTTTCCACCCAAGCCTA |
| | | | AAGACACACTGATGATTTCCCGAACCCCCGAAGTCACATGCGTGGTCGT |
| | | | GTCTGTGAGTCACGAGGACCCTGAAGTCAAGTTCAACTGGTACGTGGAT |
| | | | GGCGTCGAGGTGCATAATGCCAAGACTAAACCTAGGGAGGAACAGTAC |
| | | | AACTCAACCTATCGCGTCGTGAGCGTCCTGACAGTGCTGCACCAGGATT |
| | | | GGCTGAACGGCAAAGAATATAAGTGCAAAGTGAGCAATAAGGCCCTGC |
| | | | CCGCTCCTATCGAGAAAACCATTTCCAAGGCTAAAGGGCAGCCTCGCG |
| | | | AACCTCAGGTGTACGTGTATCCACCCTCCCGCGATGAGCTGACAAAGAA |
| | | | CCAGGTGTCTCTGACCTGTCTGGTGAAGGGCTTTTACCCTAGCGACATC |
| | | | GCCGTGGAGTGGGAGTCCAATGGCCAGCCAGAGAACAATTATAAGACC |
| | | | ACACCTCCAGTGCTGGACTCTGATGGCAGCTTCGCCCTGGTGTCTAAGC |
| | | | TGACAGTGGACAAGAGCAGATGGCAGCAGGGCAACGTGTTTTCTTGTA |
| | | | GCGTGATGCACGAGGCCCTGCACAATCACTACACCCAGAAGTCCCTGA |
| | | | GCTTAAGCCCTGGAGGCAGCGCCGATGGAGGAATCTGGGAGCTGAAGA |
| | | | AGGACGTGTACGTGGTGGAGCTGGACTGGTATCCAGATGCACCAGGAG |
| | | | AGATGGTGGTGCTGACCTGCGACACACCAGAGGAGGATGGCATCACCT |
| | | | GGACACTGAGCCAGAGCTCCAGAGTGCTGGGCTCCGGCAAGACCCTGA |
| | | | CAATCCAGGTGAGCAGCTTCGGCGACGCCGGACAGTACACCTGTCACA |
| | | | AGGGCGGCGAGGTGCTGTCCCACTCTCTGCTGCTGCTGCACAAGAAGG |
| | | | AGGACGGCATCTGGAGCACAGACATCCTGAAGGATCAGAAGGAGCCCA |
| | | | AGAACAAGACCTTCCTGAGGTGCGAGGCCAAGAATTATAGCGGCAGAT |
| | | | TCACCTGTTGGTGGCTGACCACAATCTCCACCGATCTGACATTTTCTGTG |
| | | | AAGTCTAGCAGGGGCTCCTCTGACCCTCAGGGAGTGACATGCGGAGCC |
| | | | GCCACCCTGAGCGCCGAGCGGGTGAGAGGCGATAACAAGGAGTACGAG |
| | | | TATTCCGTGGAGTGCCAGGAGGACTCTGCCTGTCCCGCCGCCGAGGAGT |
| | | | CCCTGCCTATCGAAGTGATGGTGGATGCCGTGCACGACCTGAAGTACGA |
| | | | GAATTATACAAGCTCCTTCTTTATCAGGGACATCATCAAGCCCGATCCC |
| | | | CCTAAGAACCTGCAGCTGAAGCCTCTGAAGAATAGCCGCCAGGTGGAG |
| | | | GTGTCCTGGGAGTACCCTGACACCTGGAGCACACCACACTCCTATTTCT |
| | | | CTCTGACCTTTTGCGTGCAGGTGCAGGGCAAGTCTAAGAGGGAGAAGA |
| | | | AGGACCGCGTGTTCACCGATAAGACAAGCGCCACCGTGATCTGTCGGA |
| | | | AGAACGCCAGCATCTCCGTGCGGGCCCAGGATAGATACTATTCTAGCTC |
| | | | CTGGAGCGAGTGGGCCTCCGTGCCATGTTCTGGAGGAGGAGGCAGCGG |
| | | | CGGAGGAGGCTCCGGCGGCGGCGGCTCTAATCTGCCAGTGGCCACCCC |
| | | | TGACCCAGGCATGTTCCCCTGCCTGCACCACTCTCAGAACCTGCTGCGG |
| | | | GCCGTGAGCAATATGCTGCAGAAGGCCAGACAGACACTGGAGTTTTAC |
| | | | CCATGTACCTCCGAGGAGATCGACCACGAGGATATCACAAAGGATAAG |
| | | | ACCTCTACAGTGGAGGCATGCCTGCCACTGGAGCTGACCAAGAACGAG |
| | | | AGCTGTCTGAACAGCCGGGAGACATCTTTCATCACCAACGGCAGCTGCC |
| | | | TGGCCTCCAGAAAGACATCTTTTATGATGGCCCTGTGCCTGTCTAGCAT |
| | | | CTACGAGGACCTGAAGATGTATCAGGTGGAGTTCAAGACCATGAACGC |
| | | | CAAGCTGCTGATGGACCCTAAGAGGCAGATCTTTCTGGATCAGAATATG |
| | | | CTGGCCGTGATCGACGAGCTGATGCAGGCCCTGAACTTCAATAGCGAG |
| | | | ACAGTGCCACAGAAGTCCTCTCTGGAGGAGCCCGATTTCTACAAGACCA |
| | | | AGATCAAGCTGTGCATCCTGCTGCACGCCTTCCGGATCAGAGCCGTGAC |
| | | | CATCGACCGCGTGATGAGCTACCTGAACGCCAGC |
| 337 | 24841 | full nt | GAGCCAAAGAGCTCCGACAAGACCCACACATGCCCCCCTTGTCCGGCG |
| | | | CCAGAGGCTGCAGGAGGACCAAGCGTGTTCCTGTTTCCACCCAAGCCTA |
| | | | AAGACACACTGATGATTTCCCGAACCCCCGAAGTCACATGCGTGGTCGT |
| | | | GTCTGTGAGTCACGAGGACCCTGAAGTCAAGTTCAACTGGTACGTGGAT |
| | | | GGCGTCGAGGTGCATAATGCCAAGACTAAACCTAGGGAGGAACAGTAC |
| | | | AACTCAACCTATCGCGTCGTGAGCGTCCTGACAGTGCTGCACCAGGATT |
| | | | GGCTGAACGGCAAAGAATATAAGTGCAAAGTGAGCAATAAGGCCCTGC |
| | | | CCGCTCCTATCGAGAAAACCATTTCCAAGGCTAAAGGGCAGCCTCGCG |
| | | | AACCTCAGGTGTACGTGTATCCACCCTCCCGCGATGAGCTGACAAAGAA |
| | | | CCAGGTGTCTCTGACCTGTCTGGTGAAGGGCTTTTACCCTAGCGACATC |
| | | | GCCGTGGAGTGGGAGTCCAATGGCCAGCCAGAGAACAATTATAAGACC |
| | | | ACACCTCCAGTGCTGGACTCTGATGGCAGCTTCGCCCTGGTGTCTAAGC |
| | | | TGACAGTGGACAAGAGCAGATGGCAGCAGGGCAACGTGTTTTCTTGTA |
| | | | GCGTGATGCACGAGGCCCTGCACAATCACTACACCCAGAAGTCCCTGA |
| | | | GCTTAAGCCCTGGAGGCAGCGCCGATGGAGGAATCTGGGAGCTGAAGA |
| | | | AGGACGTGTACGTGGTGGAGCTGGACTGGTATCCAGATGCACCAGGAG |
| | | | AGATGGTGGTGCTGACCTGCGACACACCAGAGGAGGATGGCATCACCT |
| | | | GGACACTGGATCAGAGCTCCGAGGTGCTGGGCTCCGGCAAGACCCTGA |
| | | | CAATCCAGGTGAAGGAGTTCGGCGACGCCGGACAGTACACCTGTCACA |
| | | | AGGGCGGCGAGGTGCTGTCCCACTCTCTGCTGCTGCTGCACAAGAAGG |
| | | | AGGACGGCATCTGGAGCACAGACATCCTGAAGGATCAGAGCAGCCCCA |
| | | | AGAACAAGACCTTCCTGAGGTGCGAGGCCAAGAATTATAGCGGCAGAT |
| | | | TCACCTGTTGGTGGCTGACCACAATCTCCACCGATCTGACATTTTCTGTG |
| | | | AAGTCTAGCAGGGGCTCCTCTGACCCTCAGGGAGTGACATGCGGAGCC |
| | | | GCCACCCTGAGCGCCGAGCGGGTGAGCGGCGATAACAAGGAGTACGAG |
| | | | TATTCCGTGGAGTGCCAGGAGGACTCTGCCTGTCCCGCCGCCGAGGAGT |
| | | | CCCTGCCTATCGAAGTGATGGTGGATGCCGTGCACAAGCTGAAGTACG |
| | | | AGAATTATACAAGCTCCTTCTTTATCAGGGACATCATCAAGCCCGATCC |
| | | | CCCTAAGAACCTGCAGCTGAAGCCTCTGAAGAATAGCCGCCAGGTGGA |
| | | | GGTGTCCTGGGAGTACCCTGACACCTGGAGCACACCACACTCCTATTTC |
| | | | TCTCTGACCTTTTGCGTGCAGGTGCAGGGCAAGTCTAAGAGGGAGAAG |
| | | | AAGGACCGCGTGTTCACCGATAAGACAAGCGCCACCGTGATCTGTCGG |
| | | | AAGAACGCCAGCATCTCCGTGCGGGCCCAGGATAGATACTATTCTAGCT |
| | | | CCTGGAGCGAGTGGGCCTCCGTGCCATGTTCTGGAGGAGGAGGCAGCG |
| | | | GCGGAGGAGGCTCCGGCGGCGGCGGCTCTAATCTGCCAGTGGCCACCC |
| | | | CTGACCCAGGCATGTTCCCCTGCCTGCACCACTCTCAGAACCTGCTGCG |
| | | | GGCCGTGAGCAATATGCTGCAGAAGGCCAGACAGACACTGGAGTTTTA |
| | | | CCCATGTACCTCCGAGGAGATCGACCACGAGGATATCACAAAGGATAA |
| | | | GACCTCTACAGTGGAGGCATGCCTGCCACTGGAGCTGACCAAGAACGA |
| | | | GAGCTGTCTGAACAGCCGGGAGACATCTTTCATCACCAACGGCAGCTGC |
| | | | CTGGCCTCCAGAAAGACATCTTTTATGATGGCCCTGTGCCTGTCTAGCA |
| | | | TCTACGAGGACCTGAAGATGTATCAGGTGGAGTTCAAGACCATGAACG |
| | | | CCAAGCTGCTGATGGACCCTAAGAGGCAGATCTTTCTGGATCAGAATAT |
| | | | GCTGGCCGTGATCGACGAGCTGATGCAGGCCCTGAACTTCAATAGCGA |
| | | | GACAGTGCCACAGAAGTCCTCTCTGGAGGAGCCCGATTTCTACAAGACC |
| | | | AAGATCAAGCTGTGCATCCTGCTGCACGCCTTCCGGATCAGAGCCGTGA |
| | | | CCATCGACCGCGTGATGAGCTACCTGAACGCCAGC |
| 338 | 24842 | full nt | GAGCCAAAGAGCTCCGACAAGACCCACACATGCCCCCCTTGTCCGGCG |
| | | | CCAGAGGCTGCAGGAGGACCAAGCGTGTTCCTGTTTCCACCCAAGCCTA |
| | | | AAGACACACTGATGATTTCCCGAACCCCCGAAGTCACATGCGTGGTCGT |
| | | | GTCTGTGAGTCACGAGGACCCTGAAGTCAAGTTCAACTGGTACGTGGAT |
| | | | GGCGTCGAGGTGCATAATGCCAAGACTAAACCTAGGGAGGAACAGTAC |
| | | | AACTCAACCTATCGCGTCGTGAGCGTCCTGACAGTGCTGCACCAGGATT |
| | | | GGCTGAACGGCAAAGAATATAAGTGCAAAGTGAGCAATAAGGCCCTGC |
| | | | CCGCTCCTATCGAGAAAACCATTTCCAAGGCTAAAGGGCAGCCTCGCG |
| | | | AACCTCAGGTGTACGTGTATCCACCCTCCCGCGATGAGCTGACAAAGAA |
| | | | CCAGGTGTCTCTGACCTGTCTGGTGAAGGGCTTTTACCCTAGCGACATC |
| | | | GCCGTGGAGTGGGAGTCCAATGGCCAGCCAGAGAACAATTATAAGACC |
| | | | ACACCTCCAGTGCTGGACTCTGATGGCAGCTTCGCCCTGGTGTCTAAGC |
| | | | TGACAGTGGACAAGAGCAGATGGCAGCAGGGCAACGTGTTTTCTTGTA |
| | | | GCGTGATGCACGAGGCCCTGCACAATCACTACACCCAGAAGTCCCTGA |
| | | | GCTTAAGCCCTGGAGGCAGCGCCGATGGAGGAATCTGGGAGCTGAAGA |
| | | | AGGACGTGTACGTGGTGGAGCTGGACTGGTATCCAGATGCACCAGGAG |
| | | | AGATGGTGGTGCTGACCTGCGACACACCAGAGGAGGATGGCATCACCT |
| | | | GGACACTGGATCAGAGCTCCGAGGTGCTGGGCTCCGGCAAGACCCTGA |
| | | | CAATCCAGGTGAAGGAGTTCGGCGACGCCGGACAGTACACCTGTCACA |
| | | | AGGGCGGCGAGGTGCTGTCCCACTCTCTGCTGCTGCTGCACAAGAAGG |
| | | | AGGACGGCATCTGGAGCACAGACATCCTGAAGGATCAGAAGGAGCCCA |
| | | | AGAACAAGACCTTCCTGAGGTGCGAGGCCAAGAATTATAGCGGCAGAT |
| | | | TCACCTGTTGGTGGCTGACCACAATCTCCACCGATCTGACATTTTCTGTG |
| | | | AAGTCTAGCAGGGGCTCCTCTGACCCTCAGGGAGTGACATGCGGAGCC |
| | | | GCCACCCTGAGCGCCGAGCGGGTGAGAGGCGATAACAAGGAGTACGAG |
| | | | TATTCCGTGGAGTGCCAGGAGGACTCTGCCTGTCCCGCCGCCGAGGAGT |
| | | | CCCTGCCTATCAGCGTGATGGTGGATGCCGTGCACAAGCTGAAGTACGA |
| | | | GAATTATAGCAGCAGATTCTTTATCAGGGACATCATCAAGCCCGATCCC |
| | | | CCTAAGAACCTGCAGCTGAAGCCTCTGAAGAATAGCCGCCAGGTGGAG |
| | | | GTGTCCTGGGAGTACCCTGACACCTGGAGCACACCACACTCCTATTTCT |
| | | | CTCTGACCTTTTGCGTGCAGGTGCAGGGCAAGTCTAAGAGGGAGAAGA |
| | | | AGGACCGCGTGTTCACCGATAAGACAAGCGCCACCGTGATCTGTCGGA |
| | | | AGAACGCCAGCATCTCCGTGCGGGCCCAGGATAGATACTATTCTAGCTC |
| | | | CTGGAGCGAGTGGGCCTCCGTGCCATGTTCTGGAGGAGGAGGCAGCGG |
| | | | CGGAGGAGGCTCCGGCGGCGGCGGCTCTAATCTGCCAGTGGCCACCCC |
| | | | TGACCCAGGCATGTTCCCCTGCCTGCACCACTCTCAGAACCTGCTGCGG |
| | | | GCCGTGAGCAATATGCTGCAGAAGGCCAGACAGACACTGGAGTTTTAC |
| | | | CCATGTACCTCCGAGGAGATCGACCACGAGGATATCACAAAGGATAAG |
| | | | ACCTCTACAGTGGAGGCATGCCTGCCACTGGAGCTGACCAAGAACGAG |
| | | | AGCTGTCTGAACAGCCGGGAGACATCTTTCATCACCAACGGCAGCTGCC |
| | | | TGGCCTCCAGAAAGACATCTTTTATGATGGCCCTGTGCCTGTCTAGCAT |
| | | | CTACGAGGACCTGAAGATGTATCAGGTGGAGTTCAAGACCATGAACGC |
| | | | CAAGCTGCTGATGGACCCTAAGAGGCAGATCTTTCTGGATCAGAATATG |
| | | | CTGGCCGTGATCGACGAGCTGATGCAGGCCCTGAACTTCAATAGCGAG |
| | | | ACAGTGCCACAGAAGTCCTCTCTGGAGGAGCCCGATTTCTACAAGACCA |
| | | | AGATCAAGCTGTGCATCCTGCTGCACGCCTTCCGGATCAGAGCCGTGAC |
| | | | CATCGACCGCGTGATGAGCTACCTGAACGCCAGC |
| 339 | 26498 | full nt | GAGCCAAAGAGCTCCGACAAGACCCACACATGCCCCCCTTGTCCGGCG |
| | | | CCAGAGGCAGCAGGAGGACCAAGCGTGTTCCTGTTTCCACCCAAGCCC |
| | | | AAAGACACCCTGATGATTAGCCGAACCCCTGAAGTCACATGCGTGGTC |
| | | | GTGTCCGTGTCTCACGAGGACCCAGAAGTCAAGTTCAACTGGTACGTGG |
| | | | ATGGCGTCGAGGTGCATAATGCCAAGACAAAACCCCGGGAGGAACAGT |
| | | | ACAACAGCACCTATAGAGTCGTGTCCGTCCTGACAGTGCTGCACCAGGA |
| | | | TTGGCTGAACGGCAAGGAATATAAGTGCAAAGTGTCCAATAAGGCCCT |
| | | | GCCCGCTCCTATCGAGAAAACCATTTCTAAGGCAAAAGGCCAGCCTCGC |
| | | | GAGCCTCAGGTGTACGTGCTGCCACCTTCCCGCGACGAGCTGACCAAGA |
| | | | ATCAGGTGTCTCTGCTGTGCCTGGTGAAGGGCTTCTATCCAAGCGATAT |
| | | | CGCAGTGGAGTGGGAGTCCAACGGACAGCCCGAGAACAATTACCTGAC |
| | | | CTGGCCACCCGTGCTGGACAGCGATGGCTCCTTCTTTCTGTATTCCAAG |
| | | | CTGACAGTGGACAAGTCTAGATGGCAGCAGGGCAACGTGTTCAGCTGT |
| | | | TCCGTGATGCACGAGGCCCTGCACAACCACTACACCCAGAAGTCTCTGA |
| | | | GCTTAAGCCCTGGAGGAGGAGGAGGCTCCGGCGGAGGAGGCTCCATGA |
| | | | GCGGGCGGAGCGCCAACGCAGGGGGCGGCGGCTCCGGCGGCGGCGGCT |
| | | | CTCAGGTGCAGCTGGTGGAGAGCGGAGGAGGAGTGGTGCAGCCCGGCA |
| | | | GAAGCCTGCGGCTGAGCTGCGCAGCCTCTGGCGTGACCTTTAGCTCCTA |
| | | | CGGCATGCACTGGGTGCGGCAGGCCCCTGGCAAGGGACTGGAGTGGGT |
| | | | GGCCTTCATCAGATATGACGGCAGCAATAAGTACTATGCCGATTCCGTG |
| | | | AAGGGCAGGTTTACCATCAGCCGCGACAACTCCAAGAATACACTGTAC |
| | | | CTGCAGATGAACAGCCTGAGGGCCGAGGACACCGCCGTGTACTATTGT |
| | | | AAGACACACGGCTCCCACGATAATTGGGGCCAGGGCACCATGGTGACA |
| | | | GTGTCTAGCGGCGGCTCTGGCGGCGGCAGCGGGGGTGGCTCTGGAGGA |
| | | | GGCAGCGGAGGAGGCTCCGGCCAGTCTGTGCTGACCCAGCCACCTTCTG |
| | | | TGAGCGGAGCCCCCGGACAGAGGGTGACAATCTCCTGCTCTGGCAGCC |
| | | | GCTCCAACATCGGCAGCAATACCGTGAAGTGGTATCAGCAGCTGCCAG |
| | | | GCACAGCCCCCAAGCTGCTGATCTACTATAATGACCAGCGGCCTTCCGG |
| | | | CGTGCCAGATAGATTCTCTGGCAGCAAGTCCGGCACCTCTGCCAGCCTG |
| | | | GCCATCACAGGCCTGCAGGCAGAGGACGAGGCAGATTACTATTGTCAG |
| | | | TCCTACGATAGATATACCCACCCCGCCCTGCTGTTTGGCACCGGCACAA |
| | | | AGGTGACAGTGCTG |
| 340 | 26320 | full AA | EPKSSDKTHTCPPCPAPEAAGGPSVFLFPPKPKDTLMISRTPEVTCVVVSVS |
| | | | HEDPEVKFNWYVDGVEVHNAKTKPREEQYNSTYRVVSVLTVLHQDWLN |
| | | | GKEYKCKVSNKALPAPIEKTISKAKGQPREPQVYVYPPSRDELTKNQVSLT |
| | | | CLVKGFYPSDIAVEWESNGQPENNYKTTPPVLDSDGSFALVSKLTVDKSR |
| | | | WQQGNVFSCSVMHEALHNHYTQKSLSLSPGGSADGGIWELKKDVYVVEL |
| | | | DWYPDAPGEMVVLTCDTPEEDGITWTLDQSSEVLGSGKTLTIQVKEFGDA |
| | | | GQYTCHKGGEVLSHSLLLLHKKEDGIWSTDILKDQKEPKNKTFLRCEAKN |
| | | | YSGRFTCWWLTTISTDLTFSVKSSRGSSDPQGVTCGAATLSAERVRGDNKE |
| | | | YEYSVECQEDSACPAAEESLPIEVMVDAVHKLKYENYTSSFFIRDIIKPDPP |
| | | | KNLQLKPLKNSRQVEVSWEYPDTWSTPHSYFSLTFCVQVQGKSKREKKDR |
| | | | VFTDKTSATVICRKNASISVRAQDRYYSSSWSEWASVPCSGGGGSGGGGS |
| | | | GGGGSNLPVATPDPGMFPCLHHSQNLLRAVSNMLQKARQTLEFYPCTSEEI |
| | | | DHEDITKDKTSTVEACLPLELTKNESCLNSRETSFITNGSCLASRKTSFMMA |
| | | | LCLSSIYEDLKMYQVEFKTMNAKLLMDPKRQIFLDQNMLAVIDELMQALN |
| | | | FNSETVPQKSSLEEPDFYKTKIKLCILLHAFRIRAVTIDRVMSYLNASGGGG |
| | | | SGGGSGGGSGGGGSGGGGSGGGGSGGGGSEIVMTQSPATLSVSPGERATL |
| | | | SCRASQSISINLHWYQQKPGQAPRLLIYFASQSISGIPARFSGSGSGTEFTLTI |
| | | | SSLQSEDFAVYYCQQSNSFPLTFGGGTKVEIKGGSGGGSGGGSGGGSGGGS |
| | | | GQVQLVQSGAEVKKPGASVKVSCKASGYTFTDYYLHWVRQAPGQGLEW |
| | | | MGWIDPENGDTEYAPKFQGRVTMTTDTSTSTAYMELRSLRSDDTAVYYC |
| | | | NANKELRYFDVWGQGTMVTVSS |
| 341 | 26503 | full AA | EPKSSDKTHTCPPCPAPEAAGGPSVFLFPPKPKDTLMISRTPEVTCVVVSVS |
| | | | HEDPEVKFNWYVDGVEVHNAKTKPREEQYNSTYRVVSVLTVLHQDWLN |
| | | | GKEYKCKVSNKALPAPIEKTISKAKGQPREPQVYVLPPSRDELTKNQVSLL |
| | | | CLVKGFYPSDIAVEWESNGQPENNYLTWPPVLDSDGSFFLYSKLTVDKSR |
| | | | WQQGNVFSCSVMHEALHNHYTQKSLSLSPGGGGGSGGGGSGGGSGGGSG |
| | | | GGGSGGGGSQVQLVESGGGVVQPGRSLRLSCAASGFTFSSYGMHWVRQA |
| | | | PGKGLEWVAFIRYDGSNKYYADSVKGRFTISRDNSKNTLYLQMNSLRAED |
| | | | TAVYYCKTHGSHDNWGQGTMVTVSSGGSGGGSGGGSGGGSGGGSGQSV |
| | | | LTQPPSVSGAPGQRVTISCSGSRSNIGSNTVKWYQQLPGTAPKLLIYYNDQR |
| | | | PSGVPDRFSGSKSGTSASLAITGLQAEDEADYYCQSYDRYTHPALLFGTGT |
| | | | KVTVL |
| 342 | 26320 | full nt | GAGCCAAAGAGCTCCGACAAGACCCACACATGCCCCCCTTGTCCGGCG |
| | | | CCAGAGGCTGCAGGAGGACCAAGCGTGTTCCTGTTTCCACCCAAGCCTA |
| | | | AAGACACACTGATGATTTCCCGAACCCCCGAAGTCACATGCGTGGTCGT |
| | | | GTCTGTGAGTCACGAGGACCCTGAAGTCAAGTTCAACTGGTACGTGGAT |
| | | | GGCGTCGAGGTGCATAATGCCAAGACTAAACCTAGGGAGGAACAGTAC |
| | | | AACTCAACCTATCGCGTCGTGAGCGTCCTGACAGTGCTGCACCAGGATT |
| | | | GGCTGAACGGCAAAGAATATAAGTGCAAAGTGAGCAATAAGGCCCTGC |
| | | | CCGCTCCTATCGAGAAAACCATTTCCAAGGCTAAAGGGCAGCCTCGCG |
| | | | AACCACAGGTGTACGTGTATCCCCCTTCCCGGGACGAGCTGACCAAGA |
| | | | ACCAGGTGTCTCTGACATGCCTGGTGAAGGGCTTCTACCCCAGCGATAT |
| | | | CGCCGTGGAGTGGGAGTCCAATGGCCAGCCTGAGAACAATTATAAGAC |
| | | | CACACCACCCGTGCTGGACAGCGATGGCTCCTTCGCCCTGGTGTCCAAG |
| | | | CTGACCGTGGACAAGTCTAGGTGGCAGCAGGGCAACGTGTTTTCTTGCA |
| | | | GCGTGATGCACGAGGCCCTGCACAATCACTACACCCAGAAGTCCCTGA |
| | | | GCTTAAGCCCAGGAGGCAGCGCCGATGGAGGAATCTGGGAGCTGAAGA |
| | | | AGGACGTGTACGTGGTGGAGCTGGACTGGTACCCGGATGCCCCAGGCG |
| | | | AGATGGTGGTGCTGACCTGCGACACACCTGAGGAGGATGGCATCACCT |
| | | | GGACACTGGATCAGAGCTCCGAGGTGCTGGGCTCCGGCAAGACCCTGA |
| | | | CAATCCAGGTGAAGGAGTTCGGCGACGCCGGACAGTACACATGTCACA |
| | | | AGGGAGGAGAGGTGCTGAGCCACTCCCTGCTGCTGCTGCACAAGAAGG |
| | | | AGGACGGCATCTGGAGCACAGACATCCTGAAGGATCAGAAGGAGCCAA |
| | | | AGAACAAGACCTTCCTGCGGTGCGAGGCCAAGAATTATAGCGGCAGAT |
| | | | TCACCTGTTGGTGGCTGACCACAATCAGCACCGATCTGACATTTTCCGT |
| | | | GAAGTCTAGCAGGGGCTCCTCTGACCCCCAGGGAGTGACATGCGGAGC |
| | | | CGCCACCCTGAGCGCCGAGCGGGTGAGAGGCGATAACAAGGAGTACGA |
| | | | GTATTCCGTGGAGTGCCAGGAGGACTCTGCCTGTCCAGCCGCCGAGGA |
| | | | GTCCCTGCCAATCGAAGTGATGGTGGATGCCGTGCACAAGCTGAAGTA |
| | | | CGAGAATTATACAAGCTCCTTCTTTATCAGGGACATCATCAAGCCCGAT |
| | | | CCCCCTAAGAACCTGCAGCTGAAGCCCCTGAAGAACAGCAGACAGGTG |
| | | | GAGGTGAGCTGGGAGTACCCCGACACCTGGAGCACACCTCACTCCTATT |
| | | | TCTCTCTGACCTTTTGCGTGCAGGTGCAGGGCAAGTCTAAGAGGGAGAA |
| | | | GAAGGACCGCGTGTTCACCGATAAGACAAGCGCCACCGTGATCTGTAG |
| | | | AAAGAACGCCTCTATCAGCGTGCGGGCACAGGACCGGTACTACAGCTC |
| | | | CTCTTGGAGCGAGTGGGCCTCCGTGCCCTGCTCTGGCGGCGGCGGCTCT |
| | | | GGAGGAGGAGGCAGCGGCGGAGGAGGCTCCAACCTGCCTGTGGCCACC |
| | | | CCCGATCCTGGCATGTTCCCATGCCTGCACCACTCCCAGAACCTGCTGA |
| | | | GGGCCGTGTCTAATATGCTGCAGAAGGCCCGCCAGACACTGGAGTTTTA |
| | | | TCCCTGTACCTCCGAGGAGATCGACCACGAGGATATCACAAAGGACAA |
| | | | GACCAGCACAGTGGAGGCCTGCCTGCCTCTGGAGCTGACCAAGAACGA |
| | | | GAGCTGTCTGAACAGCCGGGAGACCAGCTTCATCACCAATGGCAGCTG |
| | | | CCTGGCCTCCAGAAAGACATCTTTTATGATGGCCCTGTGCCTGAGCTCC |
| | | | ATCTACGAGGATCTGAAGATGTATCAGGTGGAGTTCAAGACCATGAAC |
| | | | GCCAAGCTGCTGATGGACCCTAAGCGGCAGATCTTTCTGGATCAGAATA |
| | | | TGCTGGCCGTGATCGACGAGCTGATGCAGGCCCTGAACTTCAATTCCGA |
| | | | GACAGTGCCCCAGAAGTCTAGCCTGGAGGAGCCTGATTTCTACAAGAC |
| | | | CAAGATCAAGCTGTGCATCCTGCTGCACGCCTTTCGGATCAGAGCCGTG |
| | | | ACCATCGACAGAGTGATGTCTTATCTGAACGCCAGCGGCGGCGGAGGC |
| | | | TCTGGCGGCGGGAGCGGCGGCGGCAGCGGGGGAGGAGGCTCCGGAGG |
| | | | AGGAGGCTCTGGCGGCGGCGGCAGCGGCGGCGGCGGCAGCGAGATCGT |
| | | | GATGACACAGTCCCCTGCCACCCTGTCCGTGTCTCCAGGAGAGAGGGCC |
| | | | ACACTGAGCTGTAGAGCCAGCCAGTCCATCTCTATCAACCTGCACTGGT |
| | | | ATCAGCAGAAGCCAGGACAGGCCCCCAGGCTGCTGATCTATTTCGCCA |
| | | | GCCAGAGCATTTCTGGCATCCCTGCACGCTTCAGCGGCTCCGGCTCTGG |
| | | | CACCGAGTTTACCCTGACAATCTCCTCTCTGCAGTCCGAGGATTTTGCC |
| | | | GTGTACTATTGCCAGCAGAGCAATTCCTTCCCACTGACATTTGGCGGCG |
| | | | GCACCAAGGTGGAGATCAAGGGAGGCAGCGGCGGCGGCTCCGGCGGC |
| | | | GGCTCTGGCGGCGGCAGCGGAGGAGGCTCCGGACAGGTGCAGCTGGTG |
| | | | CAGAGCGGAGCCGAGGTGAAGAAGCCAGGGGCCAGCGTGAAGGTGAG |
| | | | CTGTAAGGCCTCCGGCTACACCTTCACAGACTACTATCTGCACTGGGTG |
| | | | AGGCAGGCCCCCGGCCAGGGACTGGAGTGGATGGGCTGGATCGACCCA |
| | | | GAGAACGGCGATACAGAGTACGCCCCCAAGTTTCAGGGCCGCGTGACC |
| | | | ATGACCACAGATACCTCTACAAGCACCGCCTATATGGAGCTGAGGTCCC |
| | | | TGCGCTCTGACGATACCGCCGTGTACTATTGTAACGCCAATAAGGAGCT |
| | | | GAGGTACTTTGACGTGTGGGGCCAGGGCACAATGGTGACCGTGAGCTC |
| | | | C |
| 343 | 26503 | full nt | GAGCCAAAGAGCTCCGACAAGACCCACACATGCCCCCCTTGTCCGGCG |
| | | | CCAGAGGCAGCAGGAGGACCAAGCGTGTTCCTGTTTCCACCCAAGCCC |
| | | | AAAGACACCCTGATGATTAGCCGAACCCCTGAAGTCACATGCGTGGTC |
| | | | GTGTCCGTGTCTCACGAGGACCCAGAAGTCAAGTTCAACTGGTACGTGG |
| | | | ATGGCGTCGAGGTGCATAATGCCAAGACAAAACCCCGGGAGGAACAGT |
| | | | ACAACAGCACCTATAGAGTCGTGTCCGTCCTGACAGTGCTGCACCAGGA |
| | | | TTGGCTGAACGGCAAGGAATATAAGTGCAAAGTGTCCAATAAGGCCCT |
| | | | GCCCGCTCCTATCGAGAAAACCATTTCTAAGGCAAAAGGCCAGCCTCGC |
| | | | GAGCCTCAGGTGTACGTGCTGCCACCTTCCCGCGACGAGCTGACCAAGA |
| | | | ATCAGGTGTCTCTGCTGTGCCTGGTGAAGGGCTTCTATCCAAGCGATAT |
| | | | CGCAGTGGAGTGGGAGTCCAACGGACAGCCCGAGAACAATTACCTGAC |
| | | | CTGGCCACCCGTGCTGGACAGCGATGGCTCCTTCTTTCTGTATTCCAAG |
| | | | CTGACAGTGGACAAGTCTAGATGGCAGCAGGGCAACGTGTTCAGCTGT |
| | | | TCCGTGATGCACGAGGCCCTGCACAACCACTACACCCAGAAGTCTCTGA |
| | | | GCTTAAGCCCTGGAGGAGGAGGAGGCTCCGGCGGAGGAGGCTCCGGCG |
| | | | GCGGGAGCGGCGGCGGCAGCGGGGGCGGCGGCTCCGGCGGCGGCGGC |
| | | | TCTCAGGTGCAGCTGGTGGAGAGCGGAGGAGGAGTGGTGCAGCCCGGC |
| | | | AGAAGCCTGCGGCTGAGCTGCGCAGCCTCTGGCTTCACCTTTAGCTCCT |
| | | | ACGGCATGCACTGGGTGCGGCAGGCCCCTGGCAAGGGACTGGAGTGGG |
| | | | TGGCCTTCATCAGATATGACGGCAGCAATAAGTACTATGCCGATTCCGT |
| | | | GAAGGGCAGGTTTACCATCAGCCGCGACAACTCCAAGAATACACTGTA |
| | | | CCTGCAGATGAACAGCCTGAGGGCCGAGGACACCGCCGTGTACTATTG |
| | | | TAAGACACACGGCTCCCACGATAATTGGGGCCAGGGCACCATGGTGAC |
| | | | AGTGTCTAGCGGCGGCTCTGGCGGCGGCAGCGGGGGTGGCTCTGGAGG |
| | | | AGGCAGCGGAGGAGGCTCCGGCCAGTCTGTGCTGACCCAGCCACCTTCT |
| | | | GTGAGCGGAGCCCCCGGACAGAGGGTGACAATCTCCTGCTCTGGCAGC |
| | | | CGCTCCAACATCGGCAGCAATACCGTGAAGTGGTATCAGCAGCTGCCA |
| | | | GGCACAGCCCCCAAGCTGCTGATCTACTATAATGACCAGCGGCCTTCCG |
| | | | GCGTGCCAGATAGATTCTCTGGCAGCAAGTCCGGCACCTCTGCCAGCCT |
| | | | GGCCATCACAGGCCTGCAGGCAGAGGACGAGGCAGATTACTATTGTCA |
| | | | GTCCTACGATAGATATACCCACCCCGCCCTGCTGTTTGGCACCGGCACA |
| | | | AAGGTGACAGTGCTG |
| 344 | | | AFTVTVPKDLYVVEYGSNMTIECKFPVEKQLDLAALQVF |
| | | | WMMEDKNIIQFVHGEEDLKVQHSSYRQRARLLKDQLSL |
| | | | GNAALQITDVKLQDAGVYTCLIAYKGADYKRITVKVNA |
| 345 | | | NPPTFSPALLVVTEGDNATFTCSFSNTSESFVLNWYRM |
| | | | SPSNQTDKLAAFPEDRSQPGQDSRFRVTQLPNGRDFHM |
| | | | SVVRARRNDSGTYLCGAISLAPKAQIKESLRAELRVTE |
| 346 | NA | PCS | GTGRSANA |
| 347 | NA | PCS | ASGRSANA |
| 348 | NA | PCS | GSGKSANA |
| 349 | NA | PCS | GSGRNAQV |
| 350 | NA | PCS | GSGKNAQV |
| 351 | NA | PCS | GTARLRGV |
| 352 | NA | PCS | GTSRMGTV |
| 353 | NA | PCS | GTSRQAQV |
| 354 | NA | PCS | AIKRSAQV |
| 355 | NA | PCS | STARMLQV |
| 356 | NA | PCS | GTQRSTGV |
| 357 | NA | PCS | GTRRDRIV |
| 358 | NA | PCS | GVARNYKV |
| 359 | NA | PCS | GGGRSANA |
| 360 | NA | PCS | GVGRSANA |
| 361 | NA | PCS | GIGRSANA |
| 362 | NA | PCS | GHGRSANA |
| 363 | NA | PCS | KSGRSANA |
| 364 | NA | PCS | TSGRSANA |
| 365 | NA | PCS | SSGRSANA |
| 366 | NA | PCS | RSGRSANA |

^{a}Protease cleavage sequence;
^{b}Briakinumab;
^{c}Modified IL12 heparin-binding loop sequence

TABLE 25
variants and their associated Seq ID’s

| Variant ID | Chain A Seq ID | Chain B Seq ID |
|---|---|---|
| 32862 | 306 | 62 |
| 35425 | 306 | 314 |
| 35456 | 306 | 81 |
| 36190 | 306 | 317 |
| 35436 | 341 | 62 |
| 35437 | 341 | 314 |
| 35457 | 341 | 340 |
| 36193 | 341 | 317 |
| 30806 | 20 | 62 |
| 33495 | 20 | 314 |
| 33498 | 20 | 317 |

### Example 22: Masked Cleavable IL12-Fc Variants Reduction in Tumor Growth in Mouse Tumors

[0514] In order to assess the ability of an engineered masked IL12-Fc to reduce tumor growth variants are tested in a humanized mouse tumor model. Immunodeficient mice are engrafted with a mixture of human tumor cells and PBMCs. Several weeks after engraftment mice are randomized into treatment groups and administered injections of either: vehicle control (VC); unmasked IL12-Fc (UM-IL12); masked non-cleavable IL12-Fc variant (MNC-IL12); or masked cleavable IL12-Fc variant (MC-IL12). Tumor growth in mice is monitored over a period of 60 days. Serum was isolated from peripheral blood collected for subsequent pharmacokinetic analysis of variants Tumors are collected at various timepoints after dosing and the concentration of intact and cleaved test article is quantified.

[0515] Mice dosed with VC and MNC-IL12 have profound and similar tumor growth over 60 days. Mice dosed with UM-IL12 and MC-IL12 have significant dose dependent reductions in tumor growth compared to VC and MNC-IL12. Tumor growth inhibition induced by UM-IL12 and MC-IL12 are similar.

[0516] Serum PK analysis shows prolonged serum exposure of MC-IL12. No cleaved MC-IL12 is detected in the serum at any timepoint. Cleaved MC-IL12 is detected in tumor samples at concentrations anticipated to agonize IL12 receptor. MNC-IL12 remains intact in all serum and tumor samples analyzed.

[0517] Collectively, MC-IL12 retains the anti-tumor activity of UM-IL12 and the activity of MC-IL12 is dependent on protease cleavage.

[0518] The various embodiments described herein can be combined to provide further embodiments. All U.S. patents, U.S. patent application publications, U.S. patent application, foreign patents, foreign patent applications, articles, books, manuals, treatises and other non-patent publications referred to in this specification and/or listed in the Application Data Sheet are incorporated herein by reference, in their entirety for the purpose of describing and disclosing, for example, the constructs and methodologies that are described in the publications, which might be used in connection with the methods, compositions and compounds described herein. Aspects of the embodiments can be modified if necessary to employ concepts of the various patents, applications, and publications to provide yet further embodiments. The publications discussed herein are provided solely for their disclosure prior to the filing date of the present application. Nothing herein is to be construed as an admission that the inventors described herein are not entitled to antedate such disclosure by virtue of prior invention or for any other reason.

[0519] These and other changes can be made to the embodiments in light of the above-detailed description. In general, in the following claims, the terms used should not be construed to limit the claims to the specific embodiments disclosed in the specification and the claims, but should be construed to include all possible embodiments along with the full scope of equivalents to which such claims are entitled. Accordingly, the claims are not limited by the disclosure.

The application's sequence listing, which the Patent Office published only in electronic form, follows.

SEQUENCE LISTING (366 sequences)

SEQ ID NO: 1 - protein, 23 aa, Artificial Sequence
  Signal Pep.
MRPTWAWWLFLVLLLALWAPARG

SEQ ID NO: 2 - protein, 8 aa, Artificial Sequence
  Protease cleavage sequence
TSGRSANP

SEQ ID NO: 3 - protein, 8 aa, Artificial Sequence
  Protease cleavage sequence
LSGRSDNH

SEQ ID NO: 4 - protein, 8 aa, Artificial Sequence
  Protease cleavage sequence
GSGRSAQV

SEQ ID NO: 5 - protein, 8 aa, Artificial Sequence
  Protease cleavage sequence
GSSRNADV

SEQ ID NO: 6 - protein, 8 aa, Artificial Sequence
  Protease cleavage sequence
GTARSDNV

SEQ ID NO: 7 - protein, 8 aa, Artificial Sequence
  Protease cleavage sequence
GGGRVNNV

SEQ ID NO: 8 - protein, 8 aa, Artificial Sequence
  Protease cleavage sequence
MSARILQV

SEQ ID NO: 9 - protein, 8 aa, Artificial Sequence
  Protease cleavage sequence
GKGRSANA

SEQ ID NO: 10 - protein, 8 aa, Artificial Sequence
  Protease cleavage sequence
MSGRSANA

SEQ ID NO: 11 - protein, 115 aa, Artificial Sequence [sequence omitted]

SEQ ID NO: 12 - protein, 111 aa, Artificial Sequence [sequence omitted]

SEQ ID NO: 13 - protein, 5 aa, Artificial Sequence
  Briakinumab VHCDR1
SYGMH

SEQ ID NO: 14 - protein, 17 aa, Artificial Sequence
  Briakinumab VHCDR2
FIRYDGSNKYYADSVKG

SEQ ID NO: 15 - protein, 6 aa, Artificial Sequence
  Briakinumab VHCDR3
HGSHDN

SEQ ID NO: 16 - protein, 13 aa, Artificial Sequence
  Briakinumab VLCDR1
SGSRSNIGSNTVK

SEQ ID NO: 17 - protein, 7 aa, Artificial Sequence
  Briakinumab VLCDR2
YNDQRPS

SEQ ID NO: 18 - protein, 12 aa, Artificial Sequence
  Briakinumab VLCDR3
QSYDRYTHPALL

SEQ ID NO: 19 - protein, 9 aa, Artificial Sequence
  IL12 Hep Binding Loop
QGKSKREKK

SEQ ID NO: 20 - protein, 231 aa, Artificial Sequence
  CL_ 12153 Full AA
EPKSSDKTHTCPPCPAPEAAGGPSVFLFPPKPKDTLMISRTPEVTCVVVSVSHEDPEVKFNWYVDGVEVHNAKTKPREEQYNSTYRVVSVLTVLHQDWLNGKEYKCKVSNKALPAPIEKTISKAKGQPREPQVYVLPPSRDELTKNQVSLLCLVKGFYPSDIAVEWESNGQPENNYLTWPPVLDSDGSFFLYSKLTVDKSRWQQGNVFSCSVMHEALHNHYTQKSLSLSPG

SEQ ID NO: 21 - protein, 231 aa, Artificial Sequence
  CL_ 12155 Full AA
EPKSSDKTHTCPPCPAPEAAGGPSVFLFPPKPKDTLMISRTPEVTCVVVSVSHEDPEVKFNWYVDGVEVHNAKTKPREEQYNSTYRVVSVLTVLHQDWLNGKEYKCKVSNKALPAPIEKTISKAKGQPREPQVYVYPPSRDELTKNQVSLTCLVKGFYPSDIAVEWESNGQPENNYKTTPPVLDSDGSFALVSKLTVDKSRWQQGNVFSCSVMHEALHNHYTQKSLSLSPG

SEQ ID NO: 22 - protein, 306 aa, Artificial Sequence
  CL_ 17871 Full AA (heparin binding loop underlined)
IWELKKDVYVVELDWYPDAPGEMVVLTCDTPEEDGITWTLDQSSEVLGSGKTLTIQVKEFGDAGQYTCHKGGEVLSHSLLLLHKKEDGIWSTDILKDQKEPKNKTFLRCEAKNYSGRFTCWWLTTISTDLTFSVKSSRGSSDPQGVTCGAATLSAERVRGDNKEYEYSVECQEDSACPAAEESLPIEVMVDAVHKLKYENYTSSFFIRDIIKPDPPKNLQLKPLKNSRQVEVSWEYPDTWSTPHSYFSLTFCVQVQGKSKREKKDRVFTDKTSATVICRKNASISVRAQDRYYSSSWSEWASVPCS

SEQ ID NO: 23 - protein, 197 aa, Artificial Sequence
  CL_ 17872 Full AA
RNLPVATPDPGMFPCLHHSQNLLRAVSNMLQKARQTLEFYPCTSEEIDHEDITKDKTSTVEACLPLELTKNESCLNSRETSFITNGSCLASRKTSFMMALCLSSIYEDLKMYQVEFKTMNAKLLMDPKRQIFLDQNMLAVIDELMQALNFNSETVPQKSSLEEPDFYKTKIKLCILLHAFRIRAVTIDRVMSYLNAS

SEQ ID NO: 24 - protein, 428 aa, Artificial Sequence
  CL_ 17875 Full AA
EPKSSDKTHTCPPCPAPEAAGGPSVFLFPPKPKDTLMISRTPEVTCVVVSVSHEDPEVKFNWYVDGVEVHNAKTKPREEQYNSTYRVVSVLTVLHQDWLNGKEYKCKVSNKALPAPIEKTISKAKGQPREPQVYVYPPSRDELTKNQVSLTCLVKGFYPSDIAVEWESNGQPENNYKTTPPVLDSDGSFALVSKLTVDKSRWQQGNVFSCSVMHEALHNHYTQKSLSLSPGRNLPVATPDPGMFPCLHHSQNLLRAVSNMLQKARQTLEFYPCTSEEIDHEDITKDKTSTVEACLPLELTKNESCLNSRETSFITNGSCLASRKTSFMMALCLSSIYEDLKMYQVEFKTMNAKLLMDPKRQIFLDQNMLAVIDELMQALNFNSETVPQKSSLEEPDFYKTKIKLCILLHAFRIRAVTIDRVMSYLNAS

SEQ ID NO: 25 - protein, 755 aa, Artificial Sequence
  CL_ 17876 Full AA
EPKSSDKTHTCPPCPAPEAAGGPSVFLFPPKPKDTLMISRTPEVTCVVVSVSHEDPEVKFNWYVDGVEVHNAKTKPREEQYNSTYRVVSVLTVLHQDWLNGKEYKCKVSNKALPAPIEKTISKAKGQPREPQVYVYPPSRDELTKNQVSLTCLVKGFYPSDIAVEWESNGQPENNYKTTPPVLDSDGSFALVSKLTVDKSRWQQGNVFSCSVMHEALHNHYTQKSLSLSPGGSADGGIWELKKDVYVVELDWYPDAPGEMVVLTCDTPEEDGITWTLDQSSEVLGSGKTLTIQVKEFGDAGQYTCHKGGEVLSHSLLLLHKKEDGIWSTDILKDQKEPKNKTFLRCEAKNYSGRFTCWWLTTISTDLTFSVKSSRGSSDPQGVTCGAATLSAERVRGDNKEYEYSVECQEDSACPAAEESLPIEVMVDAVHKLKYENYTSSFFIRDIIKPDPPKNLQLKPLKNSRQVEVSWEYPDTWSTPHSYFSLTFCVQVQGKSKREKKDRVFTDKTSATVICRKNASISVRAQDRYYSSSWSEWASVPCSGGGGSGGGGSGGGGSRNLPVATPDPGMFPCLHHSQNLLRAVSNMLQKARQTLEFYPCTSEEIDHEDITKDKTSTVEACLPLELTKNESCLNSRETSFITNGSCLASRKTSFMMALCLSSIYEDLKMYQVEFKTMNAKLLMDPKRQIFLDQNMLAVIDELMQALNFNSETVPQKSSLEEPDFYKTKIKLCILLHAFRIRAVTIDRVMSYLNAS

SEQ ID NO: 26 - protein, 438 aa, Artificial Sequence
  CL_ 17877 Full AA
RNLPVATPDPGMFPCLHHSQNLLRAVSNMLQKARQTLEFYPCTSEEIDHEDITKDKTSTVEACLPLELTKNESCLNSRETSFITNGSCLASRKTSFMMALCLSSIYEDLKMYQVEFKTMNAKLLMDPKRQIFLDQNMLAVIDELMQALNFNSETVPQKSSLEEPDFYKTKIKLCILLHAFRIRAVTIDRVMSYLNASGGGGSGGGGSEPKSSDKTHTCPPCPAPEAAGGPSVFLFPPKPKDTLMISRTPEVTCVVVSVSHEDPEVKFNWYVDGVEVHNAKTKPREEQYNSTYRVVSVLTVLHQDWLNGKEYKCKVSNKALPAPIEKTISKAKGQPREPQVYVYPPSRDELTKNQVSLTCLVKGFYPSDIAVEWESNGQPENNYKTTPPVLDSDGSFALVSKLTVDKSRWQQGNVFSCSVMHEALHNHYTQKSLSLSPG

SEQ ID NO: 27 - protein, 547 aa, Artificial Sequence
  CL_ 17879 Full AA
IWELKKDVYVVELDWYPDAPGEMVVLTCDTPEEDGITWTLDQSSEVLGSGKTLTIQVKEFGDAGQYTCHKGGEVLSHSLLLLHKKEDGIWSTDILKDQKEPKNKTFLRCEAKNYSGRFTCWWLTTISTDLTFSVKSSRGSSDPQGVTCGAATLSAERVRGDNKEYEYSVECQEDSACPAAEESLPIEVMVDAVHKLKYENYTSSFFIRDIIKPDPPKNLQLKPLKNSRQVEVSWEYPDTWSTPHSYFSLTFCVQVQGKSKREKKDRVFTDKTSATVICRKNASISVRAQDRYYSSSWSEWASVPCSGGGGSGGGGSEPKSSDKTHTCPPCPAPEAAGGPSVFLFPPKPKDTLMISRTPEVTCVVVSVSHEDPEVKFNWYVDGVEVHNAKTKPREEQYNSTYRVVSVLTVLHQDWLNGKEYKCKVSNKALPAPIEKTISKAKGQPREPQVYVYPPSRDELTKNQVSLTCLVKGFYPSDIAVEWESNGQPENNYKTTPPVLDSDGSFALVSKLTVDKSRWQQGNVFSCSVMHEALHNHYTQKSLSLSPG

SEQ ID NO: 28 - protein, 547 aa, Artificial Sequence
  CL_ 17880 Full AA
EPKSSDKTHTCPPCPAPEAAGGPSVFLFPPKPKDTLMISRTPEVTCVVVSVSHEDPEVKFNWYVDGVEVHNAKTKPREEQYNSTYRVVSVLTVLHQDWLNGKEYKCKVSNKALPAPIEKTISKAKGQPREPQVYVLPPSRDELTKNQVSLLCLVKGFYPSDIAVEWESNGQPENNYLTWPPVLDSDGSFFLYSKLTVDKSRWQQGNVFSCSVMHEALHNHYTQKSLSLSPGGGGGSGGGGSIWELKKDVYVVELDWYPDAPGEMVVLTCDTPEEDGITWTLDQSSEVLGSGKTLTIQVKEFGDAGQYTCHKGGEVLSHSLLLLHKKEDGIWSTDILKDQKEPKNKTFLRCEAKNYSGRFTCWWLTTISTDLTFSVKSSRGSSDPQGVTCGAATLSAERVRGDNKEYEYSVECQEDSACPAAEESLPIEVMVDAVHKLKYENYTSSFFIRDIIKPDPPKNLQLKPLKNSRQVEVSWEYPDTWSTPHSYFSLTFCVQVQGKSKREKKDRVFTDKTSATVICRKNASISVRAQDRYYSSSWSEWASVPCS

SEQ ID NO: 29 - protein, 428 aa, Artificial Sequence
  CL_ 17881 Full AA
EPKSSDKTHTCPPCPAPEAAGGPSVFLFPPKPKDTLMISRTPEVTCVVVSVSHEDPEVKFNWYVDGVEVHNAKTKPREEQYNSTYRVVSVLTVLHQDWLNGKEYKCKVSNKALPAPIEKTISKAKGQPREPQVYVLPPSRDELTKNQVSLLCLVKGFYPSDIAVEWESNGQPENNYLTWPPVLDSDGSFFLYSKLTVDKSRWQQGNVFSCSVMHEALHNHYTQKSLSLSPGRNLPVATPDPGMFPCLHHSQNLLRAVSNMLQKARQTLEFYPCTSEEIDHEDITKDKTSTVEACLPLELTKNESCLNSRETSFITNGSCLASRKTSFMMALCLSSIYEDLKMYQVEFKTMNAKLLMDPKRQIFLDQNMLAVIDELMQALNFNSETVPQKSSLEEPDFYKTKIKLCILLHAFRIRAVTIDRVMSYLNAS

SEQ ID NO: 30 - protein, 401 aa, Artificial Sequence
  CL_ 17906 Full AA
EPKSSDKTHTCPPCPAPEAAGGPSVFLFPPKPKDTLMISRTPEVTCVVVSVSHEDPEVKFNWYVDGVEVHNAKTKPREEQYNSTYRVVSVLTVLHQDWLNGKEYKCKVSNKALPAPIEKTISKAKGQPREPQVYVYPPSRDELTKNQVSLTCLVKGFYPSDIAVEWESNGQPENNYKTTPPVLDSDGSFALVSKLTVDKSRWQQGNVFSCSVMHEALHNHYTQKSLSLSPGRAVPGGSSPAWTQCQQLSQKLCTLAWSAHPLVGHMDLREEGDEETTNDVPHIQCGDGCDPQGLRDNSQFCLQRIHQGLIFYEKLLGSDIFTGEPSLLPDSPVGQLHASLLGLSQLLQPEGHHWETQQIPSLSPSQPWQRLLLRFKILRSLQAFVAVAARVFAHGAATLSP

SEQ ID NO: 31 - protein, 411 aa, Artificial Sequence
  CL_ 17907 Full AA
RAVPGGSSPAWTQCQQLSQKLCTLAWSAHPLVGHMDLREEGDEETTNDVPHIQCGDGCDPQGLRDNSQFCLQRIHQGLIFYEKLLGSDIFTGEPSLLPDSPVGQLHASLLGLSQLLQPEGHHWETQQIPSLSPSQPWQRLLLRFKILRSLQAFVAVAARVFAHGAATLSPGGGGSGGGGSEPKSSDKTHTCPPCPAPEAAGGPSVFLFPPKPKDTLMISRTPEVTCVVVSVSHEDPEVKFNWYVDGVEVHNAKTKPREEQYNSTYRVVSVLTVLHQDWLNGKEYKCKVSNKALPAPIEKTISKAKGQPREPQVYVYPPSRDELTKNQVSLTCLVKGFYPSDIAVEWESNGQPENNYKTTPPVLDSDGSFALVSKLTVDKSRWQQGNVFSCSVMHEALHNHYTQKSLSLSPG

SEQ ID NO: 32 - protein, 170 aa, Artificial Sequence
  CL_ 17908 Full AA
RAVPGGSSPAWTQCQQLSQKLCTLAWSAHPLVGHMDLREEGDEETTNDVPHIQCGDGCDPQGLRDNSQFCLQRIHQGLIFYEKLLGSDIFTGEPSLLPDSPVGQLHASLLGLSQLLQPEGHHWETQQIPSLSPSQPWQRLLLRFKILRSLQAFVAVAARVFAHGAATLSP

SEQ ID NO: 33 - protein, 547 aa, Artificial Sequence
  CL_ 17942 Full AA
EPKSSDKTHTCPPCPAPEAAGGPSVFLFPPKPKDTLMISRTPEVTCVVVSVSHEDPEVKFNWYVDGVEVHNAKTKPREEQYNSTYRVVSVLTVLHQDWLNGKEYKCKVSNKALPAPIEKTISKAKGQPREPQVYVYPPSRDELTKNQVSLTCLVKGFYPSDIAVEWESNGQPENNYKTTPPVLDSDGSFALVSKLTVDKSRWQQGNVFSCSVMHEALHNHYTQKSLSLSPGGGGGSGGGGSIWELKKDVYVVELDWYPDAPGEMVVLTCDTPEEDGITWTLDQSSEVLGSGKTLTIQVKEFGDAGQYTCHKGGEVLSHSLLLLHKKEDGIWSTDILKDQKEPKNKTFLRCEAKNYSGRFTCWWLTTISTDLTFSVKSSRGSSDPQGVTCGAATLSAERVRGDNKEYEYSVECQEDSACPAAEESLPIEVMVDAVHKLKYENYTSSFFIRDIIKPDPPKNLQLKPLKNSRQVEVSWEYPDTWSTPHSYFSLTFCVQVQGKSKREKKDRVFTDKTSATVICRKNASISVRAQDRYYSSSWSEWASVPCS

SEQ ID NO: 34 - protein, 733 aa, Artificial Sequence
  CL_ 17945 Full AA
EPKSSDKTHTCPPCPAPEAAGGPSVFLFPPKPKDTLMISRTPEVTCVVVSVSHEDPEVKFNWYVDGVEVHNAKTKPREEQYNSTYRVVSVLTVLHQDWLNGKEYKCKVSNKALPAPIEKTISKAKGQPREPQVYVYPPSRDELTKNQVSLTCLVKGFYPSDIAVEWESNGQPENNYKTTPPVLDSDGSFALVSKLTVDKSRWQQGNVFSCSVMHEALHNHYTQKSLSLSPGGSADGGIWELKKDVYVVELDWYPDAPGEMVVLTCDTPEEDGITWTLDQSSEVLGSGKTLTIQVKEFGDAGQYTCHKGGEVLSHSLLLLHKKEDGIWSTDILKDQKEPKNKTFLRCEAKNYSGRFTCWWLTTISTDLTFSVKSSRGSSDPQGVTCGAATLSAERVRGDNKEYEYSVECQEDSACPAAEESLPIEVMVDAVHKLKYENYTSSFFIRDIIKPDPPKNLQLKPLKNSRQVEVSWEYPDTWSTPHSYFSLTFCVQVQGKSKREKKDRVFTDKTSATVICRKNASISVRAQDRYYSSSWSEWASVPCSGGGGSGGGGSGGGGSGGGGSRAVPGGSSPAWTQCQQLSQKLCTLAWSAHPLVGHMDLREEGDEETTNDVPHIQCGDGCDPQGLRDNSQFCLQRIHQGLIFYEKLLGSDIFTGEPSLLPDSPVGQLHASLLGLSQLLQPEGHHWETQQIPSLSPSQPWQRLLLRFKILRSLQAFVAVAARVFAHGAATLSP

SEQ ID NO: 35 - protein, 444 aa, Artificial Sequence
  CL_ 18939 Full AA
QVQLVESGGGVVQPGRSLRLSCAASGFTFSSYGMHWVRQAPGKGLEWVAFIRYDGSNKYYADSVKGRFTISRDNSKNTLYLQMNSLRAEDTAVYYCKTHGSHDNWGQGTMVTVSSASTKGPSVFPLAPSSKSTSGGTAALGCLVKDYFPEPVTVSWNSGALTSGVHTFPAVLQSSGLYSLSSVVTVPSSSLGTQTYICNVNHKPSNTKVDKRVEPKSCDKTHTCPPCPAPEAAGGPSVFLFPPKPKDTLMISRTPEVTCVVVSVSHEDPEVKFNWYVDGVEVHNAKTKPREEQYNSTYRVVSVLTVLHQDWLNGKEYKCKVSNKALPAPIEKTISKAKGQPREPQVYVLPPSRDELTKNQVSLLCLVKGFYPSDIAVEWESNGQPENNYLTWPPVLDSDGSFFLYSKLTVDKSRWQQGNVFSCSVMHEALHNHYTQKSLSLSPG

SEQ ID NO: 36 - protein, 217 aa, Artificial Sequence
  CL_ 18940 Full AA
QSVLTQPPSVSGAPGQRVTISCSGSRSNIGSNTVKWYQQLPGTAPKLLIYYNDQRPSGVPDRFSGSKSGTSASLAITGLQAEDEADYYCQSYDRYTHPALLFGTGTKVTVLGQPKAAPSVTLFPPSSEELQANKATLVCLISDFYPGAVTVAWKADSSPVKAGVETTTPSKQSNNKYAASSYLSLTPEQWKSHRSYSCQVTHEGSTVEKTVAPAECS

SEQ ID NO: 37 - protein, 474 aa, Artificial Sequence
  CL_ 18942 Full AA
QVQLVESGGGVVQPGRSLRLSCAASGFTFSSYGMHWVRQAPGKGLEWVAFIRYDGSNKYYADSVKGRFTISRDNSKNTLYLQMNSLRAEDTAVYYCKTHGSHDNWGQGTMVTVSSGGGGSGGGGSGGGGSQSVLTQPPSVSGAPGQRVTISCSGSRSNIGSNTVKWYQQLPGTAPKLLIYYNDQRPSGVPDRFSGSKSGTSASLAITGLQAEDEADYYCQSYDRYTHPALLFGTGTKVTVLAAEPKSSDKTHTCPPCPAPEAAGGPSVFLFPPKPKDTLMISRTPEVTCVVVSVSHEDPEVKFNWYVDGVEVHNAKTKPREEQYNSTYRVVSVLTVLHQDWLNGKEYKCKVSNKALPAPIEKTISKAKGQPREPQVYVLPPSRDELTKNQVSLLCLVKGFYPSDIAVEWESNGQPENNYLTWPPVLDSDGSFFLYSKLTVDKSRWQQGNVFSCSVMHEALHNHYTQKSLSLSPG

SEQ ID NO: 38 - protein, 474 aa, Artificial Sequence
  CL_ 18943 Full AA
QSVLTQPPSVSGAPGQRVTISCSGSRSNIGSNTVKWYQQLPGTAPKLLIYYNDQRPSGVPDRFSGSKSGTSASLAITGLQAEDEADYYCQSYDRYTHPALLFGTGTKVTVLGGGGSGGGGSGGGGSQVQLVESGGGVVQPGRSLRLSCAASGFTFSSYGMHWVRQAPGKGLEWVAFIRYDGSNKYYADSVKGRFTISRDNSKNTLYLQMNSLRAEDTAVYYCKTHGSHDNWGQGTMVTVSSAAEPKSSDKTHTCPPCPAPEAAGGPSVFLFPPKPKDTLMISRTPEVTCVVVSVSHEDPEVKFNWYVDGVEVHNAKTKPREEQYNSTYRVVSVLTVLHQDWLNGKEYKCKVSNKALPAPIEKTISKAKGQPREPQVYVLPPSRDELTKNQVSLLCLVKGFYPSDIAVEWESNGQPENNYLTWPPVLDSDGSFFLYSKLTVDKSRWQQGNVFSCSVMHEALHNHYTQKSLSLSPG

SEQ ID NO: 39 - protein, 562 aa, Artificial Sequence
  CL_ 18953 Full AA
EPKSSDKTHTCPPCPAPEAAGGPSVFLFPPKPKDTLMISRTPEVTCVVVSVSHEDPEVKFNWYVDGVEVHNAKTKPREEQYNSTYRVVSVLTVLHQDWLNGKEYKCKVSNKALPAPIEKTISKAKGQPREPQVYVLPPSRDELTKNQVSLLCLVKGFYPSDIAVEWESNGQPENNYLTWPPVLDSDGSFFLYSKLTVDKSRWQQGNVFSCSVMHEALHNHYTQKSLSLSPGGGGGSLSGRSDNHGGGGSGGGGSGGGGSGGGGSKIDACKRGDVTVKPSHVILLGSTVNITCSLKPRQGCFHYSRRNKLILYKFDRRINFHHGHSLNSQVTGLPLGTTLFVCKLACINSDEIQICGAEIFVGVAPEQPQNLSCIQKGEQGTVACTWERGRDTHLYTEYTLQLSGPKNLTWQKQCKDIYCDYLDFGINLTPESPESNFTAKVTAVNSLGSSSSLPSTFTFLDIVRPLPPWDIRIKFQKASVSRCTLYWRDEGLVLLNRLRYRPSNSRLWNMVNVTKAKGRHDLLDLKPFTEYEFQISSKLHLYKGSWSDWSESLRAQTPEEEP

SEQ ID NO: 40 - protein, 552 aa, Artificial Sequence
  CL_ 18954 Full AA
KIDACKRGDVTVKPSHVILLGSTVNITCSLKPRQGCFHYSRRNKLILYKFDRRINFHHGHSLNSQVTGLPLGTTLFVCKLACINSDEIQICGAEIFVGVAPEQPQNLSCIQKGEQGTVACTWERGRDTHLYTEYTLQLSGPKNLTWQKQCKDIYCDYLDFGINLTPESPESNFTAKVTAVNSLGSSSSLPSTFTFLDIVRPLPPWDIRIKFQKASVSRCTLYWRDEGLVLLNRLRYRPSNSRLWNMVNVTKAKGRHDLLDLKPFTEYEFQISSKLHLYKGSWSDWSESLRAQTPEEEPGGGGSGGGGSLSGRSDNHGGGGSEPKSSDKTHTCPPCPAPEAAGGPSVFLFPPKPKDTLMISRTPEVTCVVVSVSHEDPEVKFNWYVDGVEVHNAKTKPREEQYNSTYRVVSVLTVLHQDWLNGKEYKCKVSNKALPAPIEKTISKAKGQPREPQVYVLPPSRDELTKNQVSLLCLVKGFYPSDIAVEWESNGQPENNYLTWPPVLDSDGSFFLYSKLTVDKSRWQQGNVFSCSVMHEALHNHYTQKSLSLSPG

SEQ ID NO: 41 - protein, 562 aa, Artificial Sequence
  CL_ 18956 Full AA
KIDACKRGDVTVKPSHVILLGSTVNITCSLKPRQGCFHYSRRNKLILYKFDRRINFHHGHSLNSQVTGLPLGTTLFVCKLACINSDEIQICGAEIFVGVAPGGGGSGGGGSLSGRSDNHGGGGSRNLPVATPDPGMFPCLHHSQNLLRAVSNMLQKARQTLEFYPCTSEEIDHEDITKDKTSTVEACLPLELTKNESCLNSRETSFITNGSCLASRKTSFMMALCLSSIYEDLKMYQVEFKTMNAKLLMDPKRQIFLDQNMLAVIDELMQALNFNSETVPQKSSLEEPDFYKTKIKLCILLHAFRIRAVTIDRVMSYLNASGGGGSGGGGSEPKSSDKTHTCPPCPAPEAAGGPSVFLFPPKPKDTLMISRTPEVTCVVVSVSHEDPEVKFNWYVDGVEVHNAKTKPREEQYNSTYRVVSVLTVLHQDWLNGKEYKCKVSNKALPAPIEKTISKAKGQPREPQVYVYPPSRDELTKNQVSLTCLVKGFYPSDIAVEWESNGQPENNYKTTPPVLDSDGSFALVSKLTVDKSRWQQGNVFSCSVMHEALHNHYTQKSLSLSPG

SEQ ID NO: 42 - protein, 879 aa, Artificial Sequence
  CL_ 18957 Full AA
EPKSSDKTHTCPPCPAPEAAGGPSVFLFPPKPKDTLMISRTPEVTCVVVSVSHEDPEVKFNWYVDGVEVHNAKTKPREEQYNSTYRVVSVLTVLHQDWLNGKEYKCKVSNKALPAPIEKTISKAKGQPREPQVYVYPPSRDELTKNQVSLTCLVKGFYPSDIAVEWESNGQPENNYKTTPPVLDSDGSFALVSKLTVDKSRWQQGNVFSCSVMHEALHNHYTQKSLSLSPGGSADGGIWELKKDVYVVELDWYPDAPGEMVVLTCDTPEEDGITWTLDQSSEVLGSGKTLTIQVKEFGDAGQYTCHKGGEVLSHSLLLLHKKEDGIWSTDILKDQKEPKNKTFLRCEAKNYSGRFTCWWLTTISTDLTFSVKSSRGSSDPQGVTCGAATLSAERVRGDNKEYEYSVECQEDSACPAAEESLPIEVMVDAVHKLKYENYTSSFFIRDIIKPDPPKNLQLKPLKNSRQVEVSWEYPDTWSTPHSYFSLTFCVQVQGKSKREKKDRVFTDKTSATVICRKNASISVRAQDRYYSSSWSEWASVPCSGGGGSGGGGSGGGGSRNLPVATPDPGMFPCLHHSQNLLRAVSNMLQKARQTLEFYPCTSEEIDHEDITKDKTSTVEACLPLELTKNESCLNSRETSFITNGSCLASRKTSFMMALCLSSIYEDLKMYQVEFKTMNAKLLMDPKRQIFLDQNMLAVIDELMQALNFNSETVPQKSSLEEPDFYKTKIKLCILLHAFRIRAVTIDRVMSYLNASGGGGSLSGRSDNHGGGGSGGGGSKIDACKRGDVTVKPSHVILLGSTVNITCSLKPRQGCFHYSRRNKLILYKFDRRINFHHGHSLNSQVTGLPLGTTLFVCKLACINSDEIQICGAEIFVGVAP

SEQ ID NO: 43 - protein, 580 aa, Artificial Sequence
  CL_ 21415 Full AA
IWELKKDVYVVELDWYPDAPGEMVVLTCDTPEEDGITWTLDQSSEVLGSGKTLTIQVKEFGDAGQYTCHKGGEVLSHSLLLLHKKEDGIWSTDILKDQKEPKNKTFLRCEAKNYSGRFTCWWLTTISTDLTFSVKSSRGSSDPQGVTCGAATLSAERVRGDNKEYEYSVECQEDSACPAAEESLPIEVMVDAVHKLKYENYTSSFFIRDIIKPDPPKNLQLKPLKNSRQVEVSWEYPDTWSTPHSYFSLTFCVQVQGKSKREKKDRVFTDKTSATVICRKNASISVRAQDRYYSSSWSEWASVPCSGGGGSGGGGSMSGRSANAGGGGSGGGGSGGGGSQSVLTQPPSVSGAPGQRVTISCSGSRSNIGSNTVKWYQQLPGTAPKLLIYYNDQRPSGVPDRFSGSKSGTSASLAITGLQAEDEADYYCQSYDRYTHPALLFGTGTKVTVLGGGGSGGGGSGGGGSQVQLVESGGGVVQPGRSLRLSCAASGFTFSSYGMHWVRQAPGKGLEWVAFIRYDGSNKYYADSVKGRFTISRDNSKNTLYLQMNSLRAEDTAVYYCKTHGSHDNWGQGTMVTVSS

SEQ ID NO: 44 - protein, 702 aa, Artificial Sequence
  CL_ 21416 Full AA
EPKSSDKTHTCPPCPAPEAAGGPSVFLFPPKPKDTLMISRTPEVTCVVVSVSHEDPEVKFNWYVDGVEVHNAKTKPREEQYNSTYRVVSVLTVLHQDWLNGKEYKCKVSNKALPAPIEKTISKAKGQPREPQVYVYPPSRDELTKNQVSLTCLVKGFYPSDIAVEWESNGQPENNYKTTPPVLDSDGSFALVSKLTVDKSRWQQGNVFSCSVMHEALHNHYTQKSLSLSPGRNLPVATPDPGMFPCLHHSQNLLRAVSNMLQKARQTLEFYPCTSEEIDHEDITKDKTSTVEACLPLELTKNESCLNSRETSFITNGSCLASRKTSFMMALCLSSIYEDLKMYQVEFKTMNAKLLMDPKRQIFLDQNMLAVIDELMQALNFNSETVPQKSSLEEPDFYKTKIKLCILLHAFRIRAVTIDRVMSYLNASGGGGSGGGGSMSGRSANAGGGGSGGGGSGGGGSQSVLTQPPSVSGAPGQRVTISCSGSRSNIGSNTVKWYQQLPGTAPKLLIYYNDQRPSGVPDRFSGSKSGTSASLAITGLQAEDEADYYCQSYDRYTHPALLFGTGTKVTVLGGGGSGGGGSGGGGSQVQLVESGGGVVQPGRSLRLSCAASGFTFSSYGMHWVRQAPGKGLEWVAFIRYDGSNKYYADSVKGRFTISRDNSKNTLYLQMNSLRAEDTAVYYCKTHGSHDNWGQGTMVTVSS

SEQ ID NO: 45 - protein, 500 aa, Artificial Sequence
  CL_ 21417 Full AA
EPKSSDKTHTCPPCPAPEAAGGPSVFLFPPKPKDTLMISRTPEVTCVVVSVSHEDPEVKFNWYVDGVEVHNAKTKPREEQYNSTYRVVSVLTVLHQDWLNGKEYKCKVSNKALPAPIEKTISKAKGQPREPQVYVLPPSRDELTKNQVSLLCLVKGFYPSDIAVEWESNGQPENNYLTWPPVLDSDGSFFLYSKLTVDKSRWQQGNVFSCSVMHEALHNHYTQKSLSLSPGGGGGSGGGGSMSGRSANAGGGGSGGGGSQSVLTQPPSVSGAPGQRVTISCSGSRSNIGSNTVKWYQQLPGTAPKLLIYYNDQRPSGVPDRFSGSKSGTSASLAITGLQAEDEADYYCQSYDRYTHPALLFGTGTKVTVLGGGGSGGGGSGGGGSQVQLVESGGGVVQPGRSLRLSCAASGFTFSSYGMHWVRQAPGKGLEWVAFIRYDGSNKYYADSVKGRFTISRDNSKNTLYLQMNSLRAEDTAVYYCKTHGSHDNWGQGTMVTVSS

SEQ ID NO: 46 - protein, 821 aa, Artificial Sequence
  CL_ 21418 Full AA
QVQLVESGGGVVQPGRSLRLSCAASGFTFSSYGMHWVRQAPGKGLEWVAFIRYDGSNKYYADSVKGRFTISRDNSKNTLYLQMNSLRAEDTAVYYCKTHGSHDNWGQGTMVTVSSGGGGSGGGGSGGGGSQSVLTQPPSVSGAPGQRVTISCSGSRSNIGSNTVKWYQQLPGTAPKLLIYYNDQRPSGVPDRFSGSKSGTSASLAITGLQAEDEADYYCQSYDRYTHPALLFGTGTKVTVLGGGGSGGGGSGGGGSMSGRSANAGGGGSGGGGSIWELKKDVYVVELDWYPDAPGEMVVLTCDTPEEDGITWTLDQSSEVLGSGKTLTIQVKEFGDAGQYTCHKGGEVLSHSLLLLHKKEDGIWSTDILKDQKEPKNKTFLRCEAKNYSGRFTCWWLTTISTDLTFSVKSSRGSSDPQGVTCGAATLSAERVRGDNKEYEYSVECQEDSACPAAEESLPIEVMVDAVHKLKYENYTSSFFIRDIIKPDPPKNLQLKPLKNSRQVEVSWEYPDTWSTPHSYFSLTFCVQVQGKSKREKKDRVFTDKTSATVICRKNASISVRAQDRYYSSSWSEWASVPCSGGGGSGGGGSEPKSSDKTHTCPPCPAPEAAGGPSVFLFPPKPKDTLMISRTPEVTCVVVSVSHEDPEVKFNWYVDGVEVHNAKTKPREEQYNSTYRVVSVLTVLHQDWLNGKEYKCKVSNKALPAPIEKTISKAKGQPREPQVYVYPPSRDELTKNQVSLTCLVKGFYPSDIAVEWESNGQPENNYKTTPPVLDSDGSFALVSKLTVDKSRWQQGNVFSCSVMHEALHNHYTQKSLSLSPG

SEQ ID NO: 47 - protein, 471 aa, Artificial Sequence
  CL_ 21419 Full AA
RNLPVATPDPGMFPCLHHSQNLLRAVSNMLQKARQTLEFYPCTSEEIDHEDITKDKTSTVEACLPLELTKNESCLNSRETSFITNGSCLASRKTSFMMALCLSSIYEDLKMYQVEFKTMNAKLLMDPKRQIFLDQNMLAVIDELMQALNFNSETVPQKSSLEEPDFYKTKIKLCILLHAFRIRAVTIDRVMSYLNASGGGGSGGGGSMSGRSANAGGGGSGGGGSGGGGSQSVLTQPPSVSGAPGQRVTISCSGSRSNIGSNTVKWYQQLPGTAPKLLIYYNDQRPSGVPDRFSGSKSGTSASLAITGLQAEDEADYYCQSYDRYTHPALLFGTGTKVTVLGGGGSGGGGSGGGGSQVQLVESGGGVVQPGRSLRLSCAASGFTFSSYGMHWVRQAPGKGLEWVAFIRYDGSNKYYADSVKGRFTISRDNSKNTLYLQMNSLRAEDTAVYYCKTHGSHDNWGQGTMVTVSS

SEQ ID NO: 48 - protein, 821 aa, Artificial Sequence
  CL_ 21421 Full AA
EPKSSDKTHTCPPCPAPEAAGGPSVFLFPPKPKDTLMISRTPEVTCVVVSVSHEDPEVKFNWYVDGVEVHNAKTKPREEQYNSTYRVVSVLTVLHQDWLNGKEYKCKVSNKALPAPIEKTISKAKGQPREPQVYVYPPSRDELTKNQVSLTCLVKGFYPSDIAVEWESNGQPENNYKTTPPVLDSDGSFALVSKLTVDKSRWQQGNVFSCSVMHEALHNHYTQKSLSLSPGGGGGSGGGGSIWELKKDVYVVELDWYPDAPGEMVVLTCDTPEEDGITWTLDQSSEVLGSGKTLTIQVKEFGDAGQYTCHKGGEVLSHSLLLLHKKEDGIWSTDILKDQKEPKNKTFLRCEAKNYSGRFTCWWLTTISTDLTFSVKSSRGSSDPQGVTCGAATLSAERVRGDNKEYEYSVECQEDSACPAAEESLPIEVMVDAVHKLKYENYTSSFFIRDIIKPDPPKNLQLKPLKNSRQVEVSWEYPDTWSTPHSYFSLTFCVQVQGKSKREKKDRVFTDKTSATVICRKNASISVRAQDRYYSSSWSEWASVPCSGGGGSGGGGSMSGRSANAGGGGSGGGGSGGGGSQSVLTQPPSVSGAPGQRVTISCSGSRSNIGSNTVKWYQQLPGTAPKLLIYYNDQRPSGVPDRFSGSKSGTSASLAITGLQAEDEADYYCQSYDRYTHPALLFGTGTKVTVLGGGGSGGGGSGGGGSQVQLVESGGGVVQPGRSLRLSCAASGFTFSSYGMHWVRQAPGKGLEWVAFIRYDGSNKYYADSVKGRFTISRDNSKNTLYLQMNSLRAEDTAVYYCKTHGSHDNWGQGTMVTVSS

SEQ ID NO: 49 - protein, 1039 aa, Artificial Sequence
  CL_ 21423 Full AA
EPKSSDKTHTCPPCPAPEAAGGPSVFLFPPKPKDTLMISRTPEVTCVVVSVSHEDPEVKFNWYVDGVEVHNAKTKPREEQYNSTYRVVSVLTVLHQDWLNGKEYKCKVSNKALPAPIEKTISKAKGQPREPQVYVYPPSRDELTKNQVSLTCLVKGFYPSDIAVEWESNGQPENNYKTTPPVLDSDGSFALVSKLTVDKSRWQQGNVFSCSVMHEALHNHYTQKSLSLSPGGSADGGIWELKKDVYVVELDWYPDAPGEMVVLTCDTPEEDGITWTLDQSSEVLGSGKTLTIQVKEFGDAGQYTCHKGGEVLSHSLLLLHKKEDGIWSTDILKDQKEPKNKTFLRCEAKNYSGRFTCWWLTTISTDLTFSVKSSRGSSDPQGVTCGAATLSAERVRGDNKEYEYSVECQEDSACPAAEESLPIEVMVDAVHKLKYENYTSSFFIRDIIKPDPPKNLQLKPLKNSRQVEVSWEYPDTWSTPHSYFSLTFCVQVQGKSKREKKDRVFTDKTSATVICRKNASISVRAQDRYYSSSWSEWASVPCSGGGGSGGGGSGGGGSRNLPVATPDPGMFPCLHHSQNLLRAVSNMLQKARQTLEFYPCTSEEIDHEDITKDKTSTVEACLPLELTKNESCLNSRETSFITNGSCLASRKTSFMMALCLSSIYEDLKMYQVEFKTMNAKLLMDPKRQIFLDQNMLAVIDELMQALNFNSETVPQKSSLEEPDFYKTKIKLCILLHAFRIRAVTIDRVMSYLNASGGGGSGGGGSGGGGSMSGRSANAGGGGSGGGGSGGGGSGGGGSQSVLTQPPSVSGAPGQRVTISCSGSRSNIGSNTVKWYQQLPGTAPKLLIYYNDQRPSGVPDRFSGSKSGTSASLAITGLQAEDEADYYCQSYDRYTHPALLFGTGTKVTVLGGGGSGGGGSGGGGSQVQLVESGGGVVQPGRSLRLSCAASGFTFSSYGMHWVRQAPGKGLEWVAFIRYDGSNKYYADSVKGRFTISRDNSKNTLYLQMNSLRAEDTAVYYCKTHGSHDNWGQGTMVTVSS

SEQ ID NO: 50 - protein, 575 aa, Artificial Sequence
  CL_ 21446 Full AA
QVQLVESGGGVVQPGRSLRLSCAASGFTFSSYGMHWVRQAPGKGLEWVAFIRYDGSNKYYADSVKGRFTISRDNSKNTLYLQMNSLRAEDTAVYYCKTHGSHDNWGQGTMVTVSSGGGGSGGGGSGGGGSQSVLTQPPSVSGAPGQRVTISCSGSRSNIGSNTVKWYQQLPGTAPKLLIYYNDQRPSGVPDRFSGSKSGTSASLAITGLQAEDEADYYCQSYDRYTHPALLFGTGTKVTVLGGGGSGGGGSMSGRSANAGGGGSGGGGSIWELKKDVYVVELDWYPDAPGEMVVLTCDTPEEDGITWTLDQSSEVLGSGKTLTIQVKEFGDAGQYTCHKGGEVLSHSLLLLHKKEDGIWSTDILKDQKEPKNKTFLRCEAKNYSGRFTCWWLTTISTDLTFSVKSSRGSSDPQGVTCGAATLSAERVRGDNKEYEYSVECQEDSACPAAEESLPIEVMVDAVHKLKYENYTSSFFIRDIIKPDPPKNLQLKPLKNSRQVEVSWEYPDTWSTPHSYFSLTFCVQVQGKSKREKKDRVFTDKTSATVICRKNASISVRAQDRYYSSSWSEWASVPCS

SEQ ID NO: 51 - protein, 481 aa, Artificial Sequence
  CL_ 21447 Full AA
QVQLVESGGGVVQPGRSLRLSCAASGFTFSSYGMHWVRQAPGKGLEWVAFIRYDGSNKYYADSVKGRFTISRDNSKNTLYLQMNSLRAEDTAVYYCKTHGSHDNWGQGTMVTVSSGGGGSGGGGSGGGGSQSVLTQPPSVSGAPGQRVTISCSGSRSNIGSNTVKWYQQLPGTAPKLLIYYNDQRPSGVPDRFSGSKSGTSASLAITGLQAEDEADYYCQSYDRYTHPALLFGTGTKVTVLGGGGSGGGGSGGGGSGGGGSMSGRSANAGGGGSGGGGSGGGGSRNLPVATPDPGMFPCLHHSQNLLRAVSNMLQKARQTLEFYPCTSEEIDHEDITKDKTSTVEACLPLELTKNESCLNSRETSFITNGSCLASRKTSFMMALCLSSIYEDLKMYQVEFKTMNAKLLMDPKRQIFLDQNMLAVIDELMQALNFNSETVPQKSSLEEPDFYKTKIKLCILLHAFRIRAVTIDRVMSYLNAS

SEQ ID NO: 52 - protein, 515 aa, Artificial Sequence
  CL_ 21451 Full AA
QVQLVESGGGVVQPGRSLRLSCAASGFTFSSYGMHWVRQAPGKGLEWVAFIRYDGSNKYYADSVKGRFTISRDNSKNTLYLQMNSLRAEDTAVYYCKTHGSHDNWGQGTMVTVSSGGGGSGGGGSGGGGSQSVLTQPPSVSGAPGQRVTISCSGSRSNIGSNTVKWYQQLPGTAPKLLIYYNDQRPSGVPDRFSGSKSGTSASLAITGLQAEDEADYYCQSYDRYTHPALLFGTGTKVTVLGGGGSGGGGSGGGGSGGGGSMSGRSANAGGGGSGGGGSGGGGSEPKSSDKTHTCPPCPAPEAAGGPSVFLFPPKPKDTLMISRTPEVTCVVVSVSHEDPEVKFNWYVDGVEVHNAKTKPREEQYNSTYRVVSVLTVLHQDWLNGKEYKCKVSNKALPAPIEKTISKAKGQPREPQVYVLPPSRDELTKNQVSLLCLVKGFYPSDIAVEWESNGQPENNYLTWPPVLDSDGSFFLYSKLTVDKSRWQQGNVFSCSVMHEALHNHYTQKSLSLSPG

SEQ ID NO: 53 - protein, 722 aa, Artificial Sequence
  CL_ 21452 Full AA
QVQLVESGGGVVQPGRSLRLSCAASGFTFSSYGMHWVRQAPGKGLEWVAFIRYDGSNKYYADSVKGRFTISRDNSKNTLYLQMNSLRAEDTAVYYCKTHGSHDNWGQGTMVTVSSGGGGSGGGGSGGGGSQSVLTQPPSVSGAPGQRVTISCSGSRSNIGSNTVKWYQQLPGTAPKLLIYYNDQRPSGVPDRFSGSKSGTSASLAITGLQAEDEADYYCQSYDRYTHPALLFGTGTKVTVLGGGGSGGGGSGGGGSMSGRSANAGGGGSGGGGSGGGGSGGGGSRNLPVATPDPGMFPCLHHSQNLLRAVSNMLQKARQTLEFYPCTSEEIDHEDITKDKTSTVEACLPLELTKNESCLNSRETSFITNGSCLASRKTSFMMALCLSSIYEDLKMYQVEFKTMNAKLLMDPKRQIFLDQNMLAVIDELMQALNFNSETVPQKSSLEEPDFYKTKIKLCILLHAFRIRAVTIDRVMSYLNASGGGGSGGGGSEPKSSDKTHTCPPCPAPEAAGGPSVFLFPPKPKDTLMISRTPEVTCVVVSVSHEDPEVKFNWYVDGVEVHNAKTKPREEQYNSTYRVVSVLTVLHQDWLNGKEYKCKVSNKALPAPIEKTISKAKGQPREPQVYVYPPSRDELTKNQVSLTCLVKGFYPSDIAVEWESNGQPENNYKTTPPVLDSDGSFALVSKLTVDKSRWQQGNVFSCSVMHEALHNHYTQKSLSLSPG

SEQ ID NO: 54 - protein, 474 aa, Artificial Sequence
  CL_ 22203 Full AA
QVQLVESGGGVVQPGRSLRLSCAASGFTFSSAGMHWVRQAPGKGLEWVAFIRYDGSNKYYADSVKGRFTISRDNSKNTLYLQMNSLRAEDTAVYYCKTHGSHDNWGQGTMVTVSSGGGGSGGGGSGGGGSQSVLTQPPSVSGAPGQRVTISCSGSRSNIGSNTVKWYQQLPGTAPKLLIYYNDQRPSGVPDRFSGSKSGTSASLAITGLQAEDEADYYCQSYDRYTHPALLFGTGTKVTVLAAEPKSSDKTHTCPPCPAPEAAGGPSVFLFPPKPKDTLMISRTPEVTCVVVSVSHEDPEVKFNWYVDGVEVHNAKTKPREEQYNSTYRVVSVLTVLHQDWLNGKEYKCKVSNKALPAPIEKTISKAKGQPREPQVYVLPPSRDELTKNQVSLLCLVKGFYPSDIAVEWESNGQPENNYLTWPPVLDSDGSFFLYSKLTVDKSRWQQGNVFSCSVMHEALHNHYTQKSLSLSPG

SEQ ID NO: 55 - protein, 474 aa, Artificial Sequence
  CL_ 22206 Full AA
QVQLVESGGGVVQPGRSLRLSCAASGVTFSSYGMHWVRQAPGKGLEWVAFIRYDGSNKYYADSVKGRFTISRDNSKNTLYLQMNSLRAEDTAVYYCKTHGSHDNWGQGTMVTVSSGGGGSGGGGSGGGGSQSVLTQPPSVSGAPGQRVTISCSGSRSNIGSNTVKWYQQLPGTAPKLLIYYNDQRPSGVPDRFSGSKSGTSASLAITGLQAEDEADYYCQSYDRYTHPALLFGTGTKVTVLAAEPKSSDKTHTCPPCPAPEAAGGPSVFLFPPKPKDTLMISRTPEVTCVVVSVSHEDPEVKFNWYVDGVEVHNAKTKPREEQYNSTYRVVSVLTVLHQDWLNGKEYKCKVSNKALPAPIEKTISKAKGQPREPQVYVLPPSRDELTKNQVSLLCLVKGFYPSDIAVEWESNGQPENNYLTWPPVLDSDGSFFLYSKLTVDKSRWQQGNVFSCSVMHEALHNHYTQKSLSLSPG

SEQ ID NO: 56 - protein, 474 aa, Artificial Sequence
  CL_ 22207 Full AA
QVQLVESGGGVVQPGRSLRLSCAASGFTFSSYGMHWVRQAPGKGLEWVAFIRVDGSNKYYADSVKGRFTISRDNSKNTLYLQMNSLRAEDTAVYYCKTHGSHDNWGQGTMVTVSSGGGGSGGGGSGGGGSQSVLTQPPSVSGAPGQRVTISCSGSRSNIGSNTVKWYQQLPGTAPKLLIYYNDQRPSGVPDRFSGSKSGTSASLAITGLQAEDEADYYCQSYDRYTHPALLFGTGTKVTVLAAEPKSSDKTHTCPPCPAPEAAGGPSVFLFPPKPKDTLMISRTPEVTCVVVSVSHEDPEVKFNWYVDGVEVHNAKTKPREEQYNSTYRVVSVLTVLHQDWLNGKEYKCKVSNKALPAPIEKTISKAKGQPREPQVYVLPPSRDELTKNQVSLLCLVKGFYPSDIAVEWESNGQPENNYLTWPPVLDSDGSFFLYSKLTVDKSRWQQGNVFSCSVMHEALHNHYTQKSLSLSPG

SEQ ID NO: 57 - protein, 474 aa, Artificial Sequence
  CL_ 22208 Full AA
QVQLVESGGGVVQPGRSLRLSCAASGFTFSSYGMHWVRQAPGKGLEWVAFIEYDGSNKYYADSVKGRFTISRDNSKNTLYLQMNSLRAEDTAVYYCKTHGSHDNWGQGTMVTVSSGGGGSGGGGSGGGGSQSVLTQPPSVSGAPGQRVTISCSGSRSNIGSNTVKWYQQLPGTAPKLLIYYNDQRPSGVPDRFSGSKSGTSASLAITGLQAEDEADYYCQSYDRYTHPALLFGTGTKVTVLAAEPKSSDKTHTCPPCPAPEAAGGPSVFLFPPKPKDTLMISRTPEVTCVVVSVSHEDPEVKFNWYVDGVEVHNAKTKPREEQYNSTYRVVSVLTVLHQDWLNGKEYKCKVSNKALPAPIEKTISKAKGQPREPQVYVLPPSRDELTKNQVSLLCLVKGFYPSDIAVEWESNGQPENNYLTWPPVLDSDGSFFLYSKLTVDKSRWQQGNVFSCSVMHEALHNHYTQKSLSLSPG

SEQ ID NO: 58 - protein, 474 aa, Artificial Sequence
  CL_ 22209 Full AA
QVQLVESGGGVVQPGRSLRLSCAASGFTFSSYGMHWVRQAPGKGLEWVAFIEVDGSNKYYADSVKGRFTISRDNSKNTLYLQMNSLRAEDTAVYYCKTHGSHDNWGQGTMVTVSSGGGGSGGGGSGGGGSQSVLTQPPSVSGAPGQRVTISCSGSRSNIGSNTVKWYQQLPGTAPKLLIYYNDQRPSGVPDRFSGSKSGTSASLAITGLQAEDEADYYCQSYDRYTHPALLFGTGTKVTVLAAEPKSSDKTHTCPPCPAPEAAGGPSVFLFPPKPKDTLMISRTPEVTCVVVSVSHEDPEVKFNWYVDGVEVHNAKTKPREEQYNSTYRVVSVLTVLHQDWLNGKEYKCKVSNKALPAPIEKTISKAKGQPREPQVYVLPPSRDELTKNQVSLLCLVKGFYPSDIAVEWESNGQPENNYLTWPPVLDSDGSFFLYSKLTVDKSRWQQGNVFSCSVMHEALHNHYTQKSLSLSPG

SEQ ID NO: 59 - protein, 474 aa, Artificial Sequence
  CL_ 22211 Full AA
QVQLVESGGGVVQPGRSLRLSCAASGFTFSSYGMHWVRQAPGKGLEWVAFIRYDGSNKYYADSVKGRFTISRDNSKNTLYLQMNSLRAEDTAVYYCKTDGSHDNWGQGTMVTVSSGGGGSGGGGSGGGGSQSVLTQPPSVSGAPGQRVTISCSGSRSNIGSNTVKWYQQLPGTAPKLLIYYNDQRPSGVPDRFSGSKSGTSASLAITGLQAEDEADYYCQSYDRYTHPALLFGTGTKVTVLAAEPKSSDKTHTCPPCPAPEAAGGPSVFLFPPKPKDTLMISRTPEVTCVVVSVSHEDPEVKFNWYVDGVEVHNAKTKPREEQYNSTYRVVSVLTVLHQDWLNGKEYKCKVSNKALPAPIEKTISKAKGQPREPQVYVLPPSRDELTKNQVSLLCLVKGFYPSDIAVEWESNGQPENNYLTWPPVLDSDGSFFLYSKLTVDKSRWQQGNVFSCSVMHEALHNHYTQKSLSLSPG

SEQ ID NO: 60 - protein, 474 aa, Artificial Sequence
  CL_ 22212 Full AA
QVQLVESGGGVVQPGRSLRLSCAASGFTFSSYGMHWVRQAPGKGLEWVAFIRYDGSNKYYADSVKGRFTISRDNSKNTLYLQMNSLRAEDTAVYYCKTHTSHDNWGQGTMVTVSSGGGGSGGGGSGGGGSQSVLTQPPSVSGAPGQRVTISCSGSRSNIGSNTVKWYQQLPGTAPKLLIYYNDQRPSGVPDRFSGSKSGTSASLAITGLQAEDEADYYCQSYDRYTHPALLFGTGTKVTVLAAEPKSSDKTHTCPPCPAPEAAGGPSVFLFPPKPKDTLMISRTPEVTCVVVSVSHEDPEVKFNWYVDGVEVHNAKTKPREEQYNSTYRVVSVLTVLHQDWLNGKEYKCKVSNKALPAPIEKTISKAKGQPREPQVYVLPPSRDELTKNQVSLLCLVKGFYPSDIAVEWESNGQPENNYLTWPPVLDSDGSFFLYSKLTVDKSRWQQGNVFSCSVMHEALHNHYTQKSLSLSPG

SEQ ID NO: 61 - protein, 474 aa, Artificial Sequence
  CL_ 22214 Full AA
QVQLVESGGGVVQPGRSLRLSCAASGFTFSSYGMHWVRQAPGKGLEWVAFIRYDGSNKYYADSVKGRFTISRDNSKNTLYLQMNSLRAEDTAVYYCKTHGSADNWGQGTMVTVSSGGGGSGGGGSGGGGSQSVLTQPPSVSGAPGQRVTISCSGSRSNIGSNTVKWYQQLPGTAPKLLIYYNDQRPSGVPDRFSGSKSGTSASLAITGLQAEDEADYYCQSYDRYTHPALLFGTGTKVTVLAAEPKSSDKTHTCPPCPAPEAAGGPSVFLFPPKPKDTLMISRTPEVTCVVVSVSHEDPEVKFNWYVDGVEVHNAKTKPREEQYNSTYRVVSVLTVLHQDWLNGKEYKCKVSNKALPAPIEKTISKAKGQPREPQVYVLPPSRDELTKNQVSLLCLVKGFYPSDIAVEWESNGQPENNYLTWPPVLDSDGSFFLYSKLTVDKSRWQQGNVFSCSVMHEALHNHYTQKSLSLSPG

SEQ ID NO: 62 - protein, 754 aa, Artificial Sequence
  CL_ 22279 Full AA
EPKSSDKTHTCPPCPAPEAAGGPSVFLFPPKPKDTLMISRTPEVTCVVVSVSHEDPEVKFNWYVDGVEVHNAKTKPREEQYNSTYRVVSVLTVLHQDWLNGKEYKCKVSNKALPAPIEKTISKAKGQPREPQVYVYPPSRDELTKNQVSLTCLVKGFYPSDIAVEWESNGQPENNYKTTPPVLDSDGSFALVSKLTVDKSRWQQGNVFSCSVMHEALHNHYTQKSLSLSPGGSADGGIWELKKDVYVVELDWYPDAPGEMVVLTCDTPEEDGITWTLDQSSEVLGSGKTLTIQVKEFGDAGQYTCHKGGEVLSHSLLLLHKKEDGIWSTDILKDQKEPKNKTFLRCEAKNYSGRFTCWWLTTISTDLTFSVKSSRGSSDPQGVTCGAATLSAERVRGDNKEYEYSVECQEDSACPAAEESLPIEVMVDAVHKLKYENYTSSFFIRDIIKPDPPKNLQLKPLKNSRQVEVSWEYPDTWSTPHSYFSLTFCVQVQGKSKREKKDRVFTDKTSATVICRKNASISVRAQDRYYSSSWSEWASVPCSGGGGSGGGGSGGGGSNLPVATPDPGMFPCLHHSQNLLRAVSNMLQKARQTLEFYPCTSEEIDHEDITKDKTSTVEACLPLELTKNESCLNSRETSFITNGSCLASRKTSFMMALCLSSIYEDLKMYQVEFKTMNAKLLMDPKRQIFLDQNMLAVIDELMQALNFNSETVPQKSSLEEPDFYKTKIKLCILLHAFRIRAVTIDRVMSYLNAS

SEQ ID NO: 63 - protein, 750 aa, Artificial Sequence
  CL_ 22289 Full AA
EPKSSDKTHTCPPCPAPEAAGGPSVFLFPPKPKDTLMISRTPEVTCVVVSVSHEDPEVKFNWYVDGVEVHNAKTKPREEQYNSTYRVVSVLTVLHQDWLNGKEYKCKVSNKALPAPIEKTISKAKGQPREPQVYVYPPSRDELTKNQVSLTCLVKGFYPSDIAVEWESNGQPENNYKTTPPVLDSDGSFALVSKLTVDKSRWQQGNVFSCSVMHEALHNHYTQKSLSLSPGGSADGGIWELKKDVYVVELDWYPDAPGEMVVLTCDTPEEDGITWTLDQSSEVLGSGKTLTIQVKEFGDAGQYTCHKGGEVLSHSLLLLHKKEDGIWSTDILKDQKEPKNKTFLRCEAKNYSGRFTCWWLTTISTDLTFSVKSSRGSSDPQGVTCGAATLSAERVRGDNKEYEYSVECQEDSACPAAEESLPIEVMVDAVHKLKYENYTSSFFIRDIIKPDPPKNLQLKPLKNSRQVEVSWEYPDTWSTPHSYFSLTFCVQVRDDSEDRVFTDKTSATVICRKNASISVRAQDRYYSSSWSEWASVPCSGGGGSGGGGSGGGGSNLPVATPDPGMFPCLHHSQNLLRAVSNMLQKARQTLEFYPCTSEEIDHEDITKDKTSTVEACLPLELTKNESCLNSRETSFITNGSCLASRKTSFMMALCLSSIYEDLKMYQVEFKTMNAKLLMDPKRQIFLDQNMLAVIDELMQALNFNSETVPQKSSLEEPDFYKTKIKLCILLHAFRIRAVTIDRVMSYLNAS

SEQ ID NO: 64 - protein, 752 aa, Artificial Sequence
  CL_ 22290 Full AA
EPKSSDKTHTCPPCPAPEAAGGPSVFLFPPKPKDTLMISRTPEVTCVVVSVSHEDPEVKFNWYVDGVEVHNAKTKPREEQYNSTYRVVSVLTVLHQDWLNGKEYKCKVSNKALPAPIEKTISKAKGQPREPQVYVYPPSRDELTKNQVSLTCLVKGFYPSDIAVEWESNGQPENNYKTTPPVLDSDGSFALVSKLTVDKSRWQQGNVFSCSVMHEALHNHYTQKSLSLSPGGSADGGIWELKKDVYVVELDWYPDAPGEMVVLTCDTPEEDGITWTLDQSSEVLGSGKTLTIQVKEFGDAGQYTCHKGGEVLSHSLLLLHKKEDGIWSTDILKDQKEPKNKTFLRCEAKNYSGRFTCWWLTTISTDLTFSVKSSRGSSDPQGVTCGAATLSAERVRGDNKEYEYSVECQEDSACPAAEESLPIEVMVDAVHKLKYENYTSSFFIRDIIKPDPPKNLQLKPLKNSRQVEVSWEYPDTWSTPHSYFSLTFCVQVQGSQEKKDRVFTDKTSATVICRKNASISVRAQDRYYSSSWSEWASVPCSGGGGSGGGGSGGGGSNLPVATPDPGMFPCLHHSQNLLRAVSNMLQKARQTLEFYPCTSEEIDHEDITKDKTSTVEACLPLELTKNESCLNSRETSFITNGSCLASRKTSFMMALCLSSIYEDLKMYQVEFKTMNAKLLMDPKRQIFLDQNMLAVIDELMQALNFNSETVPQKSSLEEPDFYKTKIKLCILLHAFRIRAVTIDRVMSYLNAS

SEQ ID NO: 65 - protein, 754 aa, Artificial Sequence
  CL_ 22291 Full AA
EPKSSDKTHTCPPCPAPEAAGGPSVFLFPPKPKDTLMISRTPEVTCVVVSVSHEDPEVKFNWYVDGVEVHNAKTKPREEQYNSTYRVVSVLTVLHQDWLNGKEYKCKVSNKALPAPIEKTISKAKGQPREPQVYVYPPSRDELTKNQVSLTCLVKGFYPSDIAVEWESNGQPENNYKTTPPVLDSDGSFALVSKLTVDKSRWQQGNVFSCSVMHEALHNHYTQKSLSLSPGGSADGGIWELKKDVYVVELDWYPDAPGEMVVLTCDTPEEDGITWTLDQSSEVLGSGKTLTIQVKEFGDAGQYTCHKGGEVLSHSLLLLHKKEDGIWSTDILKDQKEPKNKTFLRCEAKNYSGRFTCWWLTTISTDLTFSVKSSRGSSDPQGVTCGAATLSAERVRGDNKEYEYSVECQEDSACPAAEESLPIEVMVDAVHKLKYENYTSSFFIRDIIKPDPPKNLQLKPLKNSRQVEVSWEYPDTWSTPHSYFSLTFCVQVQGESKQEKKDRVFTDKTSATVICRKNASISVRAQDRYYSSSWSEWASVPCSGGGGSGGGGSGGGGSNLPVATPDPGMFPCLHHSQNLLRAVSNMLQKARQTLEFYPCTSEEIDHEDITKDKTSTVEACLPLELTKNESCLNSRETSFITNGSCLASRKTSFMMALCLSSIYEDLKMYQVEFKTMNAKLLMDPKRQIFLDQNMLAVIDELMQALNFNSETVPQKSSLEEPDFYKTKIKLCILLHAFRIRAVTIDRVMSYLNAS

SEQ ID NO: 66 - protein, 750 aa, Artificial Sequence
  CL_ 22292 Full AA
EPKSSDKTHTCPPCPAPEAAGGPSVFLFPPKPKDTLMISRTPEVTCVVVSVSHEDPEVKFNWYVDGVEVHNAKTKPREEQYNSTYRVVSVLTVLHQDWLNGKEYKCKVSNKALPAPIEKTISKAKGQPREPQVYVYPPSRDELTKNQVSLTCLVKGFYPSDIAVEWESNGQPENNYKTTPPVLDSDGSFALVSKLTVDKSRWQQGNVFSCSVMHEALHNHYTQKSLSLSPGGSADGGIWELKKDVYVVELDWYPDAPGEMVVLTCDTPEEDGITWTLDQSSEVLGSGKTLTIQVKEFGDAGQYTCHKGGEVLSHSLLLLHKKEDGIWSTDILKDQKEPKNKTFLRCEAKNYSGRFTCWWLTTISTDLTFSVKSSRGSSDPQGVTCGAATLSAERVRGDNKEYEYSVECQEDSACPAAEESLPIEVMVDAVHKLKYENYTSSFFIRDIIKPDPPKNLQLKPLKNSRQVEVSWEYPDTWSTPHSYFSLTFCVQVQGEKKDRVFTDKTSATVICRKNASISVRAQDRYYSSSWSEWASVPCSGGGGSGGGGSGGGGSNLPVATPDPGMFPCLHHSQNLLRAVSNMLQKARQTLEFYPCTSEEIDHEDITKDKTSTVEACLPLELTKNESCLNSRETSFITNGSCLASRKTSFMMALCLSSIYEDLKMYQVEFKTMNAKLLMDPKRQIFLDQNMLAVIDELMQALNFNSETVPQKSSLEEPDFYKTKIKLCILLHAFRIRAVTIDRVMSYLNAS

SEQ ID NO: 67 - protein, 750 aa, Artificial Sequence
  CL_ 22293 Full AA
EPKSSDKTHTCPPCPAPEAAGGPSVFLFPPKPKDTLMISRTPEVTCVVVSVSHEDPEVKFNWYVDGVEVHNAKTKPREEQYNSTYRVVSVLTVLHQDWLNGKEYKCKVSNKALPAPIEKTISKAKGQPREPQVYVYPPSRDELTKNQVSLTCLVKGFYPSDIAVEWESNGQPENNYKTTPPVLDSDGSFALVSKLTVDKSRWQQGNVFSCSVMHEALHNHYTQKSLSLSPGGSADGGIWELKKDVYVVELDWYPDAPGEMVVLTCDTPEEDGITWTLDQSSEVLGSGKTLTIQVKEFGDAGQYTCHKGGEVLSHSLLLLHKKEDGIWSTDILKDQKEPKNKTFLRCEAKNYSGRFTCWWLTTISTDLTFSVKSSRGSSDPQGVTCGAATLSAERVRGDNKEYEYSVECQEDSACPAAEESLPIEVMVDAVHKLKYENYTSSFFIRDIIKPDPPKNLQLKPLKNSRQVEVSWEYPDTWSTPHSYFSLTFCVQVQDQTDDRVFTDKTSATVICRKNASISVRAQDRYYSSSWSEWASVPCSGGGGSGGGGSGGGGSNLPVATPDPGMFPCLHHSQNLLRAVSNMLQKARQTLEFYPCTSEEIDHEDITKDKTSTVEACLPLELTKNESCLNSRETSFITNGSCLASRKTSFMMALCLSSIYEDLKMYQVEFKTMNAKLLMDPKRQIFLDQNMLAVIDELMQALNFNSETVPQKSSLEEPDFYKTKIKLCILLHAFRIRAVTIDRVMSYLNAS

SEQ ID NO: 68 - protein, 750 aa, Artificial Sequence
  CL_ 22294 Full AA
EPKSSDKTHTCPPCPAPEAAGGPSVFLFPPKPKDTLMISRTPEVTCVVVSVSHEDPEVKFNWYVDGVEVHNAKTKPREEQYNSTYRVVSVLTVLHQDWLNGKEYKCKVSNKALPAPIEKTISKAKGQPREPQVYVYPPSRDELTKNQVSLTCLVKGFYPSDIAVEWESNGQPENNYKTTPPVLDSDGSFALVSKLTVDKSRWQQGNVFSCSVMHEALHNHYTQKSLSLSPGGSADGGIWELKKDVYVVELDWYPDAPGEMVVLTCDTPEEDGITWTLDQSSEVLGSGKTLTIQVKEFGDAGQYTCHKGGEVLSHSLLLLHKKEDGIWSTDILKDQKEPKNKTFLRCEAKNYSGRFTCWWLTTISTDLTFSVKSSRGSSDPQGVTCGAATLSAERVRGDNKEYEYSVECQEDSACPAAEESLPIEVMVDAVHKLKYENYTSSFFIRDIIKPDPPKNLQLKPLKNSRQVEVSWEYPDTWSTPHSYFSLTFCVQVQDDSEDRVFTDKTSATVICRKNASISVRAQDRYYSSSWSEWASVPCSGGGGSGGGGSGGGGSNLPVATPDPGMFPCLHHSQNLLRAVSNMLQKARQTLEFYPCTSEEIDHEDITKDKTSTVEACLPLELTKNESCLNSRETSFITNGSCLASRKTSFMMALCLSSIYEDLKMYQVEFKTMNAKLLMDPKRQIFLDQNMLAVIDELMQALNFNSETVPQKSSLEEPDFYKTKIKLCILLHAFRIRAVTIDRVMSYLNAS

SEQ ID NO: 69 - protein, 750 aa, Artificial Sequence
  CL_ 22295 Full AA
EPKSSDKTHTCPPCPAPEAAGGPSVFLFPPKPKDTLMISRTPEVTCVVVSVSHEDPEVKFNWYVDGVEVHNAKTKPREEQYNSTYRVVSVLTVLHQDWLNGKEYKCKVSNKALPAPIEKTISKAKGQPREPQVYVYPPSRDELTKNQVSLTCLVKGFYPSDIAVEWESNGQPENNYKTTPPVLDSDGSFALVSKLTVDKSRWQQGNVFSCSVMHEALHNHYTQKSLSLSPGGSADGGIWELKKDVYVVELDWYPDAPGEMVVLTCDTPEEDGITWTLDQSSEVLGSGKTLTIQVKEFGDAGQYTCHKGGEVLSHSLLLLHKKEDGIWSTDILKDQKEPKNKTFLRCEAKNYSGRFTCWWLTTISTDLTFSVKSSRGSSDPQGVTCGAATLSAERVRGDNKEYEYSVECQEDSACPAAEESLPIEVMVDAVHKLKYENYTSSFFIRDIIKPDPPKNLQLKPLKNSRQVEVSWEYPDTWSTPHSYFSLTFCVQVKDQTEDRVFTDKTSATVICRKNASISVRAQDRYYSSSWSEWASVPCSGGGGSGGGGSGGGGSNLPVATPDPGMFPCLHHSQNLLRAVSNMLQKARQTLEFYPCTSEEIDHEDITKDKTSTVEACLPLELTKNESCLNSRETSFITNGSCLASRKTSFMMALCLSSIYEDLKMYQVEFKTMNAKLLMDPKRQIFLDQNMLAVIDELMQALNFNSETVPQKSSLEEPDFYKTKIKLCILLHAFRIRAVTIDRVMSYLNAS

SEQ ID NO: 70 - protein, 750 aa, Artificial Sequence
  CL_ 22296 Full AA
EPKSSDKTHTCPPCPAPEAAGGPSVFLFPPKPKDTLMISRTPEVTCVVVSVSHEDPEVKFNWYVDGVEVHNAKTKPREEQYNSTYRVVSVLTVLHQDWLNGKEYKCKVSNKALPAPIEKTISKAKGQPREPQVYVYPPSRDELTKNQVSLTCLVKGFYPSDIAVEWESNGQPENNYKTTPPVLDSDGSFALVSKLTVDKSRWQQGNVFSCSVMHEALHNHYTQKSLSLSPGGSADGGIWELKKDVYVVELDWYPDAPGEMVVLTCDTPEEDGITWTLDQSSEVLGSGKTLTIQVKEFGDAGQYTCHKGGEVLSHSLLLLHKKEDGIWSTDILKDQKEPKNKTFLRCEAKNYSGRFTCWWLTTISTDLTFSVKSSRGSSDPQGVTCGAATLSAERVRGDNKEYEYSVECQEDSACPAAEESLPIEVMVDAVHKLKYENYTSSFFIRDIIKPDPPKNLQLKPLKNSRQVEVSWEYPDTWSTPHSYFSLTFCVQVQGSEKDRVFTDKTSATVICRKNASISVRAQDRYYSSSWSEWASVPCSGGGGSGGGGSGGGGSNLPVATPDPGMFPCLHHSQNLLRAVSNMLQKARQTLEFYPCTSEEIDHEDITKDKTSTVEACLPLELTKNESCLNSRETSFITNGSCLASRKTSFMMALCLSSIYEDLKMYQVEFKTMNAKLLMDPKRQIFLDQNMLAVIDELMQALNFNSETVPQKSSLEEPDFYKTKIKLCILLHAFRIRAVTIDRVMSYLNAS

SEQ ID NO: 71 - protein, 562 aa, Artificial Sequence
  CL_ 22672 Full AA
EPKSSDKTHTCPPCPAPEAAGGPSVFLFPPKPKDTLMISRTPEVTCVVVSVSHEDPEVKFNWYVDGVEVHNAKTKPREEQYNSTYRVVSVLTVLHQDWLNGKEYKCKVSNKALPAPIEKTISKAKGQPREPQVYVLPPSRDELTKNQVSLLCLVKGFYPSDIAVEWESNGQPENNYLTWPPVLDSDGSFFLYSKLTVDKSRWQQGNVFSCSVMHEALHNHYTQKSLSLSPGGGGGSMSGRSANAGGGGSGGGGSGGGGSGGGGSKIDACKRGDVTVKPSHVILLGSTVNITCSLKPRQGCFHYSRRNKLILYKFDRRINFHHGHSLNSQVTGLPLGTTLFVCKLACINSDEIQICGAEIFVGVAPEQPQNLSCIQKGEQGTVACTWERGRDTHLYTEYTLQLSGPKNLTWQKQCKDIYCDYLDFGINLTPESPESNFTAKVTAVNSLGSSSSLPSTFTFLDIVRPLPPWDIRIKFQKASVSRCTLYWRDEGLVLLNRLRYRPSNSRLWNMVNVTKAKGRHDLLDLKPFTEYEFQISSKLHLYKGSWSDWSESLRAQTPEEEP

SEQ ID NO: 72 - protein, 508 aa, Artificial Sequence
  CL_ 22735 Full AA
EPKSSDKTHTCPPCPAPEAAGGPSVFLFPPKPKDTLMISRTPEVTCVVVSVSHEDPEVKFNWYVDGVEVHNAKTKPREEQYNSTYRVVSVLTVLHQDWLNGKEYKCKVSNKALPAPIEKTISKAKGQPREPQVYVLPPSRDELTKNQVSLLCLVKGFYPSDIAVEWESNGQPENNYLTWPPVLDSDGSFFLYSKLTVDKSRWQQGNVFSCSVMHEALHNHYTQKSLSLSPGGGGGSGGGGSMSGRSANAGGGGSGGGGSQVQLVESGGGVVQPGRSLRLSCAASGFTFSSYGMHWVRQAPGKGLEWVAFIRYDGSNKYYADSVKGRFTISRDNSKNTLYLQMNSLRAEDTAVYYCKTHGSHDNWGQGTMVTVSSGGGGSMSGRSANAGGGGSGGGGSQSVLTQPPSVSGAPGQRVTISCSGSRSNIGSNTVKWYQQLPGTAPKLLIYYNDQRPSGVPDRFSGSKSGTSASLAITGLQAEDEADYYCQSYDRYTHPALLFGTGTKVTVL

SEQ ID NO: 73 - protein, 505 aa, Artificial Sequence
  CL_ 23360 Full AA
EPKSSDKTHTCPPCPAPEAAGGPSVFLFPPKPKDTLMISRTPEVTCVVVSVSHEDPEVKFNWYVDGVEVHNAKTKPREEQYNSTYRVVSVLTVLHQDWLNGKEYKCKVSNKALPAPIEKTISKAKGQPREPQVYVLPPSRDELTKNQVSLLCLVKGFYPSDIAVEWESNGQPENNYLTWPPVLDSDGSFFLYSKLTVDKSRWQQGNVFSCSVMHEALHNHYTQKSLSLSPGGGGGSGGGGSMSGRSANAGGGGSGGGGSQSVLTQPPSVSGAPGQRVTISCSGSRSNIGSNTVKWYQQLPGTAPKLLIYYNDQRPSGVPDRFSGSKSGTSASLAITGLQAEDEADYYCQSYDRYTHPALLFGTGTKVTVLGGSGGGSGGGSGGGSGGGSGQVQLVESGGGVVQPGRSLRLSCAASGFTFSSYGMHWVRQAPGKGLEWVAFIRYDGSNKYYADSVKGRFTISRDNSKNTLYLQMNSLRAEDTAVYYCKTHGSHDNWGQGTMVTVSS

SEQ ID NO: 74 - protein, 505 aa, Artificial Sequence
  CL_ 23361 Full AA
EPKSSDKTHTCPPCPAPEAAGGPSVFLFPPKPKDTLMISRTPEVTCVVVSVSHEDPEVKFNWYVDGVEVHNAKTKPREEQYNSTYRVVSVLTVLHQDWLNGKEYKCKVSNKALPAPIEKTISKAKGQPREPQVYVLPPSRDELTKNQVSLLCLVKGFYPSDIAVEWESNGQPENNYLTWPPVLDSDGSFFLYSKLTVDKSRWQQGNVFSCSVMHEALHNHYTQKSLSLSPGGGGGSGGGGSMSGRSANAGGGGSGGGGSQSVLTQPPSVSGAPGQRVTISCSGSRSNIGSNTVKWYQQLPGTAPKLLIYYNDQRPSGVPDRFSGSKSGTSASLAITGLQAEDEADYYCQSYDRYTHPALLFGCGTKVTVLGGSGGGSGGGSGGGSGGGSGQVQLVESGGGVVQPGRSLRLSCAASGFTFSSYGMHWVRQAPGKCLEWVAFIRYDGSNKYYADSVKGRFTISRDNSKNTLYLQMNSLRAEDTAVYYCKTHGSHDNWGQGTMVTVSS

SEQ ID NO: 75 - protein, 513 aa, Artificial Sequence
  CL_ 23363 Full AA
EPKSSDKTHTCPPCPAPEAAGGPSVFLFPPKPKDTLMISRTPEVTCVVVSVSHEDPEVKFNWYVDGVEVHNAKTKPREEQYNSTYRVVSVLTVLHQDWLNGKEYKCKVSNKALPAPIEKTISKAKGQPREPQVYVLPPSRDELTKNQVSLLCLVKGFYPSDIAVEWESNGQPENNYLTWPPVLDSDGSFFLYSKLTVDKSRWQQGNVFSCSVMHEALHNHYTQKSLSLSPGGGGGSGGGGSMSGRSANAGGGGSGGGGSQVQLVESGGGVVQPGRSLRLSCAASGFTFSSYGMHWVRQAPGKGLEWVAFIRYDGSNKYYADSVKGRFTISRDNSKNTLYLQMNSLRAEDTAVYYCKTHGSHDNWGQGTMVTVSSGGSGGGSMSGRSANAGGGSGGGSGGGSGQSVLTQPPSVSGAPGQRVTISCSGSRSNIGSNTVKWYQQLPGTAPKLLIYYNDQRPSGVPDRFSGSKSGTSASLAITGLQAEDEADYYCQSYDRYTHPALLFGTGTKVTVL

SEQ ID NO: 76 - protein, 513 aa, Artificial Sequence
  CL_ 23364 Full AA
EPKSSDKTHTCPPCPAPEAAGGPSVFLFPPKPKDTLMISRTPEVTCVVVSVSHEDPEVKFNWYVDGVEVHNAKTKPREEQYNSTYRVVSVLTVLHQDWLNGKEYKCKVSNKALPAPIEKTISKAKGQPREPQVYVLPPSRDELTKNQVSLLCLVKGFYPSDIAVEWESNGQPENNYLTWPPVLDSDGSFFLYSKLTVDKSRWQQGNVFSCSVMHEALHNHYTQKSLSLSPGGGGGSGGGGSMSGRSANAGGGGSGGGGSQVQLVESGGGVVQPGRSLRLSCAASGFTFSSAGMHWVRQAPGKGLEWVAFIRYDGSNKYYADSVKGRFTISRDNSKNTLYLQMNSLRAEDTAVYYCKTHGSHDNWGQGTMVTVSSGGSGGGSMSGRSANAGGGSGGGSGGGSGQSVLTQPPSVSGAPGQRVTISCSGSRSNIGSNTVKWYQQLPGTAPKLLIYYNDQRPSGVPDRFSGSKSGTSASLAITGLQAEDEADYYCQSYDRYTHPALLFGTGTKVTVL

SEQ ID NO: 77 - protein, 508 aa, Artificial Sequence
  CL_ 23512 Full AA
EPKSSDKTHTCPPCPAPEAAGGPSVFLFPPKPKDTLMISRTPEVTCVVVSVSHEDPEVKFNWYVDGVEVHNAKTKPREEQYNSTYRVVSVLTVLHQDWLNGKEYKCKVSNKALPAPIEKTISKAKGQPREPQVYVLPPSRDELTKNQVSLLCLVKGFYPSDIAVEWESNGQPENNYLTWPPVLDSDGSFFLYSKLTVDKSRWQQGNVFSCSVMHEALHNHYTQKSLSLSPGGGGGSGGGGSGGGSGGGSGGGGSGGGGSQVQLVESGGGVVQPGRSLRLSCAASGFTFSSYGMHWVRQAPGKGLEWVAFIRYDGSNKYYADSVKGRFTISRDNSKNTLYLQMNSLRAEDTAVYYCKTHGSHDNWGQGTMVTVSSGGGGSGGGSGGGSGGGGSGGGGSQSVLTQPPSVSGAPGQRVTISCSGSRSNIGSNTVKWYQQLPGTAPKLLIYYNDQRPSGVPDRFSGSKSGTSASLAITGLQAEDEADYYCQSYDRYTHPALLFGTGTKVTVL

SEQ ID NO: 78 - protein, 562 aa, Artificial Sequence
  CL_ 23513 Full AA
EPKSSDKTHTCPPCPAPEAAGGPSVFLFPPKPKDTLMISRTPEVTCVVVSVSHEDPEVKFNWYVDGVEVHNAKTKPREEQYNSTYRVVSVLTVLHQDWLNGKEYKCKVSNKALPAPIEKTISKAKGQPREPQVYVLPPSRDELTKNQVSLLCLVKGFYPSDIAVEWESNGQPENNYLTWPPVLDSDGSFFLYSKLTVDKSRWQQGNVFSCSVMHEALHNHYTQKSLSLSPGGGGGSGGGSGGGSGGGGSGGGGSGGGGSGGGGSKIDACKRGDVTVKPSHVILLGSTVNITCSLKPRQGCFHYSRRNKLILYKFDRRINFHHGHSLNSQVTGLPLGTTLFVCKLACINSDEIQICGAEIFVGVAPEQPQNLSCIQKGEQGTVACTWERGRDTHLYTEYTLQLSGPKNLTWQKQCKDIYCDYLDFGINLTPESPESNFTAKVTAVNSLGSSSSLPSTFTFLDIVRPLPPWDIRIKFQKASVSRCTLYWRDEGLVLLNRLRYRPSNSRLWNMVNVTKAKGRHDLLDLKPFTEYEFQISSKLHLYKGSWSDWSESLRAQTPEEEP

SEQ ID NO: 79 - protein, 768 aa, Artificial Sequence
  CL_ 23710 Full AA
EPKSSDKTHTCPPCPAPEAAGGPSVFLFPPKPKDTLMISRTPEVTCVVVSVSHEDPEVKFNWYVDGVEVHNAKTKPREEQYNSTYRVVSVLTVLHQDWLNGKEYKCKVSNKALPAPIEKTISKAKGQPREPQVYVYPPSRDELTKNQVSLTCLVKGFYPSDIAVEWESNGQPENNYKTTPPVLDSDGSFALVSKLTVDKSRWQQGNVFSCSVMHEALHNHYTQKSLSLSPGGSADGGMSGRSANAGSADGGIWELKKDVYVVELDWYPDAPGEMVVLTCDTPEEDGITWTLDQSSEVLGSGKTLTIQVKEFGDAGQYTCHKGGEVLSHSLLLLHKKEDGIWSTDILKDQKEPKNKTFLRCEAKNYSGRFTCWWLTTISTDLTFSVKSSRGSSDPQGVTCGAATLSAERVRGDNKEYEYSVECQEDSACPAAEESLPIEVMVDAVHKLKYENYTSSFFIRDIIKPDPPKNLQLKPLKNSRQVEVSWEYPDTWSTPHSYFSLTFCVQVQGKSKREKKDRVFTDKTSATVICRKNASISVRAQDRYYSSSWSEWASVPCSGGGGSGGGGSGGGGSNLPVATPDPGMFPCLHHSQNLLRAVSNMLQKARQTLEFYPCTSEEIDHEDITKDKTSTVEACLPLELTKNESCLNSRETSFITNGSCLASRKTSFMMALCLSSIYEDLKMYQVEFKTMNAKLLMDPKRQIFLDQNMLAVIDELMQALNFNSETVPQKSSLEEPDFYKTKIKLCILLHAFRIRAVTIDRVMSYLNAS

SEQ ID NO: 80 - protein, 768 aa, Artificial Sequence
  CL_ 23711 Full AA
EPKSSDKTHTCPPCPAPEAAGGPSVFLFPPKPKDTLMISRTPEVTCVVVSVSHEDPEVKFNWYVDGVEVHNAKTKPREEQYNSTYRVVSVLTVLHQDWLNGKEYKCKVSNKALPAPIEKTISKAKGQPREPQVYVYPPSRDELTKNQVSLTCLVKGFYPSDIAVEWESNGQPENNYKTTPPVLDSDGSFALVSKLTVDKSRWQQGNVFSCSVMHEALHNHYTQKSLSLSPGGSADGGMSGRSANAGSADGGIWELKKDVYVVELDWYPDAPGEMVVLTCDTPEEDGITWTLDQSSEVLGSGKTLTIQVKEFGDAGQYTCHKGGEVLSHSLLLLHKKEDGIWSTDILKDQKEPKNKTFLRCEAKNYSGRFTCWWLTTISTDLTFSVKSSRGSSDPQGVTCGAATLSAERVRGDNKEYEYSVECQEDSACPAAEESLPIEVMVDAVHKLKYENYTSSFFIRDIIKPDPPKNLQLKPLKNSRQVEVSWEYPDTWSTPHSYFSLTFCVQVQGESKQEKKDRVFTDKTSATVICRKNASISVRAQDRYYSSSWSEWASVPCSGGGGSGGGGSGGGGSNLPVATPDPGMFPCLHHSQNLLRAVSNMLQKARQTLEFYPCTSEEIDHEDITKDKTSTVEACLPLELTKNESCLNSRETSFITNGSCLASRKTSFMMALCLSSIYEDLKMYQVEFKTMNAKLLMDPKRQIFLDQNMLAVIDELMQALNFNSETVPQKSSLEEPDFYKTKIKLCILLHAFRIRAVTIDRVMSYLNAS

SEQ ID NO: 81 - protein, 1032 aa, Artificial Sequence
  CL_ 24228 Full AA
EPKSSDKTHTCPPCPAPEAAGGPSVFLFPPKPKDTLMISRTPEVTCVVVSVSHEDPEVKFNWYVDGVEVHNAKTKPREEQYNSTYRVVSVLTVLHQDWLNGKEYKCKVSNKALPAPIEKTISKAKGQPREPQVYVYPPSRDELTKNQVSLTCLVKGFYPSDIAVEWESNGQPENNYKTTPPVLDSDGSFALVSKLTVDKSRWQQGNVFSCSVMHEALHNHYTQKSLSLSPGGSADGGIWELKKDVYVVELDWYPDAPGEMVVLTCDTPEEDGITWTLDQSSEVLGSGKTLTIQVKEFGDAGQYTCHKGGEVLSHSLLLLHKKEDGIWSTDILKDQKEPKNKTFLRCEAKNYSGRFTCWWLTTISTDLTFSVKSSRGSSDPQGVTCGAATLSAERVRGDNKEYEYSVECQEDSACPAAEESLPIEVMVDAVHKLKYENYTSSFFIRDIIKPDPPKNLQLKPLKNSRQVEVSWEYPDTWSTPHSYFSLTFCVQVQGKSKREKKDRVFTDKTSATVICRKNASISVRAQDRYYSSSWSEWASVPCSGGGGSGGGGSGGGGSNLPVATPDPGMFPCLHHSQNLLRAVSNMLQKARQTLEFYPCTSEEIDHEDITKDKTSTVEACLPLELTKNESCLNSRETSFITNGSCLASRKTSFMMALCLSSIYEDLKMYQVEFKTMNAKLLMDPKRQIFLDQNMLAVIDELMQALNFNSETVPQKSSLEEPDFYKTKIKLCILLHAFRIRAVTIDRVMSYLNASGGGGSMSGRSANAGGGGSGGGGSGGGGSGGGGSEIVMTQSPATLSVSPGERATLSCRASQSISINLHWYQQKPGQAPRLLIYFASQSISGIPARFSGSGSGTEFTLTISSLQSEDFAVYYCQQSNSFPLTFGGGTKVEIKGGSGGGSGGGSGGGSGGGSGQVQLVQSGAEVKKPGASVKVSCKASGYTFTDYYLHWVRQAPGQGLEWMGWIDPENGDTEYAPKFQGRVTMTTDTSTSTAYMELRSLRSDDTAVYYCNANKELRYFDVWGQGTMVTVSS

SEQ ID NO: 82 - protein, 791 aa, Artificial Sequence
  CL_ 24229 Full AA
EPKSSDKTHTCPPCPAPEAAGGPSVFLFPPKPKDTLMISRTPEVTCVVVSVSHEDPEVKFNWYVDGVEVHNAKTKPREEQYNSTYRVVSVLTVLHQDWLNGKEYKCKVSNKALPAPIEKTISKAKGQPREPQVYVLPPSRDELTKNQVSLLCLVKGFYPSDIAVEWESNGQPENNYLTWPPVLDSDGSFFLYSKLTVDKSRWQQGNVFSCSVMHEALHNHYTQKSLSLSPGGGGGSGGGGSMSGRSANAGGGGSGGGGSQVQLVESGGGVVQPGRSLRLSCAASGFTFSSYGMHWVRQAPGKGLEWVAFIRYDGSNKYYADSVKGRFTISRDNSKNTLYLQMNSLRAEDTAVYYCKTHGSHDNWGQGTMVTVSSGGGGSMSGRSANAGGGGSGGGGSQSVLTQPPSVSGAPGQRVTISCSGSRSNIGSNTVKWYQQLPGTAPKLLIYYNDQRPSGVPDRFSGSKSGTSASLAITGLQAEDEADYYCQSYDRYTHPALLFGTGTKVTVLGGGGSGGGGSGGGGSMSGRSANAGGGGSGGGGSGGGGSEIVMTQSPATLSVSPGERATLSCRASQSISINLHWYQQKPGQAPRLLIYFASQSISGIPARFSGSGSGTEFTLTISSLQSEDFAVYYCQQSNSFPLTFGGGTKVEIKGGSGGGSGGGSGGGSGGGSGQVQLVQSGAEVKKPGASVKVSCKASGYTFTDYYLHWVRQAPGQGLEWMGWIDPENGDTEYAPKFQGRVTMTTDTSTSTAYMELRSLRSDDTAVYYCNANKELRYFDVWGQGTMVTVSS

SEQ ID NO: 83 - protein, 791 aa, Artificial Sequence
  CL_ 24230 Full AA
EPKSSDKTHTCPPCPAPEAAGGPSVFLFPPKPKDTLMISRTPEVTCVVVSVSHEDPEVKFNWYVDGVEVHNAKTKPREEQYNSTYRVVSVLTVLHQDWLNGKEYKCKVSNKALPAPIEKTISKAKGQPREPQVYVLPPSRDELTKNQVSLLCLVKGFYPSDIAVEWESNGQPENNYLTWPPVLDSDGSFFLYSKLTVDKSRWQQGNVFSCSVMHEALHNHYTQKSLSLSPGGGGGSGGGGSMSGRSANAGGGGSGGGGSQVQLVESGGGVVQPGRSLRLSCAASGFTFSSYGMHWVRQAPGKGLEWVAFIRYDGSNKYYADSVKGRFTISRDNSKNTLYLQMNSLRAEDTAVYYCKTHGSHDNWGQGTMVTVSSGGGGSMSGRSANAGGGGSGGGGSQSVLTQPPSVSGAPGQRVTISCSGSRSNIGSNTVKWYQQLPGTAPKLLIYYNDQRPSGVPDRFSGSKSGTSASLAITGLQAEDEADYYCQSYDRYTHPALLFGTGTKVTVLGGGGSGGGGSGGGGSMSGRSANAGGGGSGGGGSGGGGSQVQLVQSGAEVKKPGASVKVSCKASGYTFTDYYLHWVRQAPGQGLEWMGWIDPENGDTEYAPKFQGRVTMTTDTSTSTAYMELRSLRSDDTAVYYCNANKELRYFDVWGQGTMVTVSSGGSGGGSGGGSGGGSGGGSGEIVMTQSPATLSVSPGERATLSCRASQSISINLHWYQQKPGQAPRLLIYFASQSISGIPARFSGSGSGTEFTLTISSLQSEDFAVYYCQQSNSFPLTFGGGTKVEIK

SEQ ID NO: 84 - protein, 1090 aa, Artificial Sequence
  CL_ 24231 Full AA
EPKSSDKTHTCPPCPAPEAAGGPSVFLFPPKPKDTLMISRTPEVTCVVVSVSHEDPEVKFNWYVDGVEVHNAKTKPREEQYNSTYRVVSVLTVLHQDWLNGKEYKCKVSNKALPAPIEKTISKAKGQPREPQVYVYPPSRDELTKNQVSLTCLVKGFYPSDIAVEWESNGQPENNYKTTPPVLDSDGSFALVSKLTVDKSRWQQGNVFSCSVMHEALHNHYTQKSLSLSPGGSADGGIWELKKDVYVVELDWYPDAPGEMVVLTCDTPEEDGITWTLDQSSEVLGSGKTLTIQVKEFGDAGQYTCHKGGEVLSHSLLLLHKKEDGIWSTDILKDQKEPKNKTFLRCEAKNYSGRFTCWWLTTISTDLTFSVKSSRGSSDPQGVTCGAATLSAERVRGDNKEYEYSVECQEDSACPAAEESLPIEVMVDAVHKLKYENYTSSFFIRDIIKPDPPKNLQLKPLKNSRQVEVSWEYPDTWSTPHSYFSLTFCVQVQGKSKREKKDRVFTDKTSATVICRKNASISVRAQDRYYSSSWSEWASVPCSGGGGSGGGGSGGGGSNLPVATPDPGMFPCLHHSQNLLRAVSNMLQKARQTLEFYPCTSEEIDHEDITKDKTSTVEACLPLELTKNESCLNSRETSFITNGSCLASRKTSFMMALCLSSIYEDLKMYQVEFKTMNAKLLMDPKRQIFLDQNMLAVIDELMQALNFNSETVPQKSSLEEPDFYKTKIKLCILLHAFRIRAVTIDRVMSYLNASGGGGSMSGRSANAGGGGSGGGGSGGGGSGGGGSGGGGSKIDACKRGDVTVKPSHVILLGSTVNITCSLKPRQGCFHYSRRNKLILYKFDRRINFHHGHSLNSQVTGLPLGTTLFVCKLACINSDEIQICGAEIFVGVAPEQPQNLSCIQKGEQGTVACTWERGRDTHLYTEYTLQLSGPKNLTWQKQCKDIYCDYLDFGINLTPESPESNFTAKVTAVNSLGSSSSLPSTFTFLDIVRPLPPWDIRIKFQKASVSRCTLYWRDEGLVLLNRLRYRPSNSRLWNMVNVTKAKGRHDLLDLKPFTEYEFQISSKLHLYKGSWSDWSESLRAQTPEEEP

SEQ ID NO: 85 - protein, 486 aa, Artificial Sequence
  CL_ 24232 Full AA
EPKSSDKTHTCPPCPAPEAAGGPSVFLFPPKPKDTLMISRTPEVTCVVVSVSHEDPEVKFNWYVDGVEVHNAKTKPREEQYNSTYRVVSVLTVLHQDWLNGKEYKCKVSNKALPAPIEKTISKAKGQPREPQVYVLPPSRDELTKNQVSLLCLVKGFYPSDIAVEWESNGQPENNYLTWPPVLDSDGSFFLYSKLTVDKSRWQQGNVFSCSVMHEALHNHYTQKSLSLSPGGGGGSGGGGSGGGGSMSGRSANAGGGGSGGGGSGGGGSCRTSECCFQDPPYPDADSGSASGPRDLRCYRISSDRYECSWQYEGPTAGVSHFLRCCLSSGRCCYFAAGSATRLQFSDQAGVSVLYTVTLWVESWARNQTEKSPEVTLQLYNSVKYEPPLGDIKVSKLAGQLRMEWETPDNQVGAEVQFRHRTPSSPWKLGDCGPQDDDTESCLCPLEMNVAQEFQLRRRQLGSQGSSWSKWSSPVCVPPENPPQPQ

SEQ ID NO: 86 - protein, 620 aa, Artificial Sequence
  CL_ 24233 Full AA
EPKSSDKTHTCPPCPAPEAAGGPSVFLFPPKPKDTLMISRTPEVTCVVVSVSHEDPEVKFNWYVDGVEVHNAKTKPREEQYNSTYRVVSVLTVLHQDWLNGKEYKCKVSNKALPAPIEKTISKAKGQPREPQVYVLPPSRDELTKNQVSLLCLVKGFYPSDIAVEWESNGQPENNYLTWPPVLDSDGSFFLYSKLTVDKSRWQQGNVFSCSVMHEALHNHYTQKSLSLSPGGGGGSMSGRSANAGGGGSGGGGSGGGGSGGGGSKIDACKRGDVTVKPSHVILLGSTVNITCSLKPRQGCFHYSRRNKLILYKFDRRINFHHGHSLNSQVTGLPLGTTLFVCKLACINSDEIQICGAEIFVGVAPGGGGSGGGGSGGGGSMSGRSANAGGGGSGGGGSGGGGSCRTSECCFQDPPYPDADSGSASGPRDLRCYRISSDRYECSWQYEGPTAGVSHFLRCCLSSGRCCYFAAGSATRLQFSDQAGVSVLYTVTLWVESWARNQTEKSPEVTLQLYNSVKYEPPLGDIKVSKLAGQLRMEWETPDNQVGAEVQFRHRTPSSPWKLGDCGPQDDDTESCLCPLEMNVAQEFQLRRRQLGSQGSSWSKWSSPVCVPPENPPQPQ

SEQ ID NO: 87 - protein, 562 aa, Artificial Sequence
  CL_ 24235 Full AA
KIDACKRGDVTVKPSHVILLGSTVNITCSLKPRQGCFHYSRRNKLILYKFDRRINFHHGHSLNSQVTGLPLGTTLFVCKLACINSDEIQICGAEIFVGVAPGGGGSGGGGSMSGRSANAGGGGSRNLPVATPDPGMFPCLHHSQNLLRAVSNMLQKARQTLEFYPCTSEEIDHEDITKDKTSTVEACLPLELTKNESCLNSRETSFITNGSCLASRKTSFMMALCLSSIYEDLKMYQVEFKTMNAKLLMDPKRQIFLDQNMLAVIDELMQALNFNSETVPQKSSLEEPDFYKTKIKLCILLHAFRIRAVTIDRVMSYLNASGGGGSGGGGSEPKSSDKTHTCPPCPAPEAAGGPSVFLFPPKPKDTLMISRTPEVTCVVVSVSHEDPEVKFNWYVDGVEVHNAKTKPREEQYNSTYRVVSVLTVLHQDWLNGKEYKCKVSNKALPAPIEKTISKAKGQPREPQVYVYPPSRDELTKNQVSLTCLVKGFYPSDIAVEWESNGQPENNYKTTPPVLDSDGSFALVSKLTVDKSRWQQGNVFSCSVMHEALHNHYTQKSLSLSPG

SEQ ID NO: 88 - protein, 476 aa, Artificial Sequence
  CL_ 24236 Full AA
CRTSECCFQDPPYPDADSGSASGPRDLRCYRISSDRYECSWQYEGPTAGVSHFLRCCLSSGRCCYFAAGSATRLQFSDQAGVSVLYTVTLWVESWARNQTEKSPEVTLQLYNSVKYEPPLGDIKVSKLAGQLRMEWETPDNQVGAEVQFRHRTPSSPWKLGDCGPQDDDTESCLCPLEMNVAQEFQLRRRQLGSQGSSWSKWSSPVCVPPENPPQPQGGGGSGGGGSGGGGSGGGGSMSGRSANAEPKSSDKTHTCPPCPAPEAAGGPSVFLFPPKPKDTLMISRTPEVTCVVVSVSHEDPEVKFNWYVDGVEVHNAKTKPREEQYNSTYRVVSVLTVLHQDWLNGKEYKCKVSNKALPAPIEKTISKAKGQPREPQVYVLPPSRDELTKNQVSLLCLVKGFYPSDIAVEWESNGQPENNYLTWPPVLDSDGSFFLYSKLTVDKSRWQQGNVFSCSVMHEALHNHYTQKSLSLSPG

SEQ ID NO: 89 - protein, 585 aa, Artificial Sequence
  CL_ 24246 Full AA
EPKSSDKTHTCPPCPAPEAAGGPSVFLFPPKPKDTLMISRTPEVTCVVVSVSHEDPEVKFNWYVDGVEVHNAKTKPREEQYNSTYRVVSVLTVLHQDWLNGKEYKCKVSNKALPAPIEKTISKAKGQPREPQVYVYPPSRDELTKNQVSLTCLVKGFYPSDIAVEWESNGQPENNYKTTPPVLDSDGSFALVSKLTVDKSRWQQGNVFSCSVMHEALHNHYTQKSLSLSPGGGGGSMSGRSANAGGGGSGGGGSGGGGSGGGGSKIDACKRGDVTVKPSHVILLGSTVNITCSLKPRQGCFHYSRRNKLILYKFDRRINFHHGHSLNSQVTGLPLGTTLFVCKLACINSDEIQICGAEIFVGVAPGGGGSGGGGSMSGRSANAGGGGSRNLPVATPDPGMFPCLHHSQNLLRAVSNMLQKARQTLEFYPCTSEEIDHEDITKDKTSTVEACLPLELTKNESCLNSRETSFITNGSCLASRKTSFMMALCLSSIYEDLKMYQVEFKTMNAKLLMDPKRQIFLDQNMLAVIDELMQALNFNSETVPQKSSLEEPDFYKTKIKLCILLHAFRIRAVTIDRVMSYLNAS

SEQ ID NO: 90 - DNA, 693 bp, Artificial Sequence
  CL_ 12153 Full nt
gagccaaagagctccgacaagacccacacatgccccccttgtccggcgccagaggcagcaggaggaccaagcgtgttcctgtttccacccaagcccaaagacaccctgatgattagccgaacccctgaagtcacatgcgtggtcgtgtccgtgtctcacgaggacccagaagtcaagttcaactggtacgtggatggcgtcgaggtgcataatgccaagacaaaaccccgggaggaacagtacaacagcacctatagagtcgtgtccgtcctgacagtgctgcaccaggattggctgaacggcaaggaatataagtgcaaagtgtccaataaggccctgcccgctcctatcgagaaaaccatttctaaggcaaaaggccagcctcgcgaaccacaggtctacgtgctgcctccatcccgggacgagctgacaaagaaccaggtctctctgctgtgcctggtgaaaggcttctatccatcagatattgctgtggagtgggaaagcaatgggcagcccgagaacaattacctgacttggccccctgtgctggactctgatgggagtttctttctgtattctaagctgaccgtggataaaagtaggtggcagcagggaaatgtctttagttgttcagtgatgcatgaagccctgcataaccactacacccagaaaagcctgtccctgtcccccgga

SEQ ID NO: 91 - DNA, 693 bp, Artificial Sequence
  CL_ 12155 Full nt
gagccaaagagctccgacaagacccacacatgccccccttgtccggcgccagaggctgcaggaggaccaagcgtgttcctgtttccacccaagcctaaagacacactgatgatttcccgaacccccgaagtcacatgcgtggtcgtgtctgtgagtcacgaggaccctgaagtcaagttcaactggtacgtggatggcgtcgaggtgcataatgccaagactaaacctagggaggaacagtacaactcaacctatcgcgtcgtgagcgtcctgacagtgctgcaccaggattggctgaacggcaaagaatataagtgcaaagtgagcaataaggccctgcccgctcctatcgagaaaaccatttccaaggctaaagggcagcctcgcgaaccacaggtctacgtgtatcctccaagccgggacgagctgacaaagaaccaggtctccctgacttgtctggtgaaagggttttaccctagtgatatcgctgtggagtgggaatcaaatggacagccagagaacaattataagactaccccccctgtgctggacagtgatgggtcattcgcactggtctccaagctgacagtggacaaatctcggtggcagcagggaaatgtcttttcatgtagcgtgatgcatgaagcactgcacaaccattacacccagaagtcactgtcactgtcaccagga

SEQ ID NO: 92 - DNA, 639 bp, Artificial Sequence
  CL_ 12933 Full nt
gacatccagatgacacagtctcctagctccctgtccgcctctgtgggcgatagagtgaccatcacatgcagcgcctctagctccgtgtcctacatgcactggtatcagcagaagagcggcaaggccccaaagctgctgatctacgacaccagcaagctggcctccggagtgccatctaggttcagcggctccggctctggcaccgactttaccctgacaatctctagcctgcagcctgaggatttcgccacatactattgtcagcagtggtccggctatccactgacctttggccagggcacaaagctggagatcaagcgcacagtggcggcgcccagtgtcttcatttttccccctagcgacgaacagctgaagtctgggacagccagtgtggtctgtctgctgaacaacttctaccctagagaggctaaagtgcagtggaaggtcgataacgcactgcagtccggaaattctcaggagagtgtgactgaacaggactcaaaagatagcacctattccctgtcaagcacactgactctgagcaaggccgactacgagaagcataaagtgtatgcttgtgaagtcacccaccaggggctgagttcaccagtcacaaaatcattcaacagaggggagtgc

SEQ ID NO: 93 - DNA, 1617 bp, Artificial Sequence
  CL_ 17572 Full nt
caagtgggagcctgccctagcggcaagaaggcccgcgagatcgacgagtccctgatcttctacaagaagtgggagctggaggcatgcgtggacgccgccctgctggccacacagatggatagggtgaacgccatcccttttacctatgagcagctggatgtgctgaagcacaagctgccacagggacagggaggaggaggctccggaggaggcggcaactctccactgagcgggcggagcgacaatcaccagggacagtctggacagggaggacaggtgcagctggtgcagagcggagccgaggtgaagaagcctggggccagcgtgaaggtgtcttgcaaggcctctggctacagcttcacaggctataccatgaattgggtgcggcaggccccaggacagggactggagtggatgggcctgatcacaccctacaacggggccagctcctataatcagaagtttcggggcaaggccaccatgacagtggacaccagcacatccaccgtgtacatggagctgtctagcctgagaagcgaggataccgccgtgtactattgtgccagaggcggctacgacggcagaggctttgattattggggccagggcacactggtgaccgtgtcctctgctagcactaaggggccttccgtgtttccactggctccctctagtaaatccacctctggaggcacagctgcactgggatgtctggtgaaggattacttccctgaaccagtcacagtgagttggaactcaggggctctgacaagtggagtccatacttttcccgcagtgctgcagtcaagcggactgtactccctgtcctctgtggtcaccgtgcctagttcaagcctgggcacccagacatatatctgcaacgtgaatcacaagccatcaaatacaaaagtcgacaagaaagtggagcccaagagctgtgataaaactcatacctgcccaccttgtccggcgccagaggcagcaggaggaccaagcgtgttcctgtttccacccaagcccaaagacaccctgatgattagccgaacccctgaagtcacatgcgtggtcgtgtccgtgtctcacgaggacccagaagtcaagttcaactggtacgtggatggcgtcgaggtgcataatgccaagacaaaaccccgggaggaacagtacaacagcacctatagagtcgtgtccgtcctgacagtgctgcaccaggattggctgaacggcaaggaatataagtgcaaagtgtccaataaggccctgcccgctcctatcgagaaaaccatttctaaggcaaaaggccagcctcgcgaaccacaggtctacgtgctgcctccatcccgggacgagctgacaaagaaccaggtctctctgctgtgcctggtgaaaggcttctatccatcagatattgctgtggagtgggaaagcaatgggcagcccgagaacaattacctgacttggccccctgtgctggactctgatgggagtttctttctgtattctaagctgaccgtggataaaagtaggtggcagcagggaaatgtctttagttgttcagtgatgcatgaagccctgcataaccactacacccagaaaagcctgtccctgtcccccgga

SEQ ID NO: 94 - DNA, 1617 bp, Artificial Sequence
  CL_ 17573 Full nt
caagtgggagcctgccctagcggcaagaaggcccgcgagatcgacgagtccctgatcttctacaagaagtgggagctggaggcatgcgtggacgccgccctgctggccacacagatggatagggtgaacgccatcccttttacctatgagcagctggatgtgctgaagcacaagctgccacagggacagggaggaggaggctccggaggaggcggcaactctccaaccagcgggcggagcgcaaatccccagggacagtctggacagggaggacaggtgcagctggtgcagagcggagccgaggtgaagaagcctggggccagcgtgaaggtgtcttgcaaggcctctggctacagcttcacaggctataccatgaattgggtgcggcaggccccaggacagggactggagtggatgggcctgatcacaccctacaacggggccagctcctataatcagaagtttcggggcaaggccaccatgacagtggacaccagcacatccaccgtgtacatggagctgtctagcctgagaagcgaggataccgccgtgtactattgtgccagaggcggctacgacggcagaggctttgattattggggccagggcacactggtgaccgtgtcctctgctagcactaaggggccttccgtgtttccactggctccctctagtaaatccacctctggaggcacagctgcactgggatgtctggtgaaggattacttccctgaaccagtcacagtgagttggaactcaggggctctgacaagtggagtccatacttttcccgcagtgctgcagtcaagcggactgtactccctgtcctctgtggtcaccgtgcctagttcaagcctgggcacccagacatatatctgcaacgtgaatcacaagccatcaaatacaaaagtcgacaagaaagtggagcccaagagctgtgataaaactcatacctgcccaccttgtccggcgccagaggcagcaggaggaccaagcgtgttcctgtttccacccaagcccaaagacaccctgatgattagccgaacccctgaagtcacatgcgtggtcgtgtccgtgtctcacgaggacccagaagtcaagttcaactggtacgtggatggcgtcgaggtgcataatgccaagacaaaaccccgggaggaacagtacaacagcacctatagagtcgtgtccgtcctgacagtgctgcaccaggattggctgaacggcaaggaatataagtgcaaagtgtccaataaggccctgcccgctcctatcgagaaaaccatttctaaggcaaaaggccagcctcgcgaaccacaggtctacgtgctgcctccatcccgggacgagctgacaaagaaccaggtctctctgctgtgcctggtgaaaggcttctatccatcagatattgctgtggagtgggaaagcaatgggcagcccgagaacaattacctgacttggccccctgtgctggactctgatgggagtttctttctgtattctaagctgaccgtggataaaagtaggtggcagcagggaaatgtctttagttgttcagtgatgcatgaagccctgcataaccactacacccagaaaagcctgtccctgtcccccgga

SEQ ID NO: 95 - DNA, 1617 bp, Artificial Sequence
  CL_ 17577 Full nt
caagtgggagcctgccctagcggcaagaaggcccgcgagatcgacgagtccctgatcttctacaagaagtgggagctggaggcatgcgtggacgccgccctgctggccacacagatggatagggtgaacgccatcccttttacctatgagcagctggatgtgctgaagcacaagctgccacagggacagggaggaggaggctccggaggaggcggcaactctccagggagcgggcggagcgcacaggtgcagggacagtctggacagggaggacaggtgcagctggtgcagagcggagccgaggtgaagaagcctggggccagcgtgaaggtgtcttgcaaggcctctggctacagcttcacaggctataccatgaattgggtgcggcaggccccaggacagggactggagtggatgggcctgatcacaccctacaacggggccagctcctataatcagaagtttcggggcaaggccaccatgacagtggacaccagcacatccaccgtgtacatggagctgtctagcctgagaagcgaggataccgccgtgtactattgtgccagaggcggctacgacggcagaggctttgattattggggccagggcacactggtgaccgtgtcctctgctagcactaaggggccttccgtgtttccactggctccctctagtaaatccacctctggaggcacagctgcactgggatgtctggtgaaggattacttccctgaaccagtcacagtgagttggaactcaggggctctgacaagtggagtccatacttttcccgcagtgctgcagtcaagcggactgtactccctgtcctctgtggtcaccgtgcctagttcaagcctgggcacccagacatatatctgcaacgtgaatcacaagccatcaaatacaaaagtcgacaagaaagtggagcccaagagctgtgataaaactcatacctgcccaccttgtccggcgccagaggcagcaggaggaccaagcgtgttcctgtttccacccaagcccaaagacaccctgatgattagccgaacccctgaagtcacatgcgtggtcgtgtccgtgtctcacgaggacccagaagtcaagttcaactggtacgtggatggcgtcgaggtgcataatgccaagacaaaaccccgggaggaacagtacaacagcacctatagagtcgtgtccgtcctgacagtgctgcaccaggattggctgaacggcaaggaatataagtgcaaagtgtccaataaggccctgcccgctcctatcgagaaaaccatttctaaggcaaaaggccagcctcgcgaaccacaggtctacgtgctgcctccatcccgggacgagctgacaaagaaccaggtctctctgctgtgcctggtgaaaggcttctatccatcagatattgctgtggagtgggaaagcaatgggcagcccgagaacaattacctgacttggccccctgtgctggactctgatgggagtttctttctgtattctaagctgaccgtggataaaagtaggtggcagcagggaaatgtctttagttgttcagtgatgcatgaagccctgcataaccactacacccagaaaagcctgtccctgtcccccgga

SEQ ID NO: 96 - DNA, 1617 bp, Artificial Sequence
  CL_ 17578 Full nt
caagtgggagcctgccctagcggcaagaaggcccgcgagatcgacgagtccctgatcttctacaagaagtgggagctggaggcatgcgtggacgccgccctgctggccacacagatggatagggtgaacgccatcccttttacctatgagcagctggatgtgctgaagcacaagctgccacagggacagggaggaggaggctccggaggaggcggcaactctccagggagcagccggaacgcagacgtgcagggacagtctggacagggaggacaggtgcagctggtgcagagcggagccgaggtgaagaagcctggggccagcgtgaaggtgtcttgcaaggcctctggctacagcttcacaggctataccatgaattgggtgcggcaggccccaggacagggactggagtggatgggcctgatcacaccctacaacggggccagctcctataatcagaagtttcggggcaaggccaccatgacagtggacaccagcacatccaccgtgtacatggagctgtctagcctgagaagcgaggataccgccgtgtactattgtgccagaggcggctacgacggcagaggctttgattattggggccagggcacactggtgaccgtgtcctctgctagcactaaggggccttccgtgtttccactggctccctctagtaaatccacctctggaggcacagctgcactgggatgtctggtgaaggattacttccctgaaccagtcacagtgagttggaactcaggggctctgacaagtggagtccatacttttcccgcagtgctgcagtcaagcggactgtactccctgtcctctgtggtcaccgtgcctagttcaagcctgggcacccagacatatatctgcaacgtgaatcacaagccatcaaatacaaaagtcgacaagaaagtggagcccaagagctgtgataaaactcatacctgcccaccttgtccggcgccagaggcagcaggaggaccaagcgtgttcctgtttccacccaagcccaaagacaccctgatgattagccgaacccctgaagtcacatgcgtggtcgtgtccgtgtctcacgaggacccagaagtcaagttcaactggtacgtggatggcgtcgaggtgcataatgccaagacaaaaccccgggaggaacagtacaacagcacctatagagtcgtgtccgtcctgacagtgctgcaccaggattggctgaacggcaaggaatataagtgcaaagtgtccaataaggccctgcccgctcctatcgagaaaaccatttctaaggcaaaaggccagcctcgcgaaccacaggtctacgtgctgcctccatcccgggacgagctgacaaagaaccaggtctctctgctgtgcctggtgaaaggcttctatccatcagatattgctgtggagtgggaaagcaatgggcagcccgagaacaattacctgacttggccccctgtgctggactctgatgggagtttctttctgtattctaagctgaccgtggataaaagtaggtggcagcagggaaatgtctttagttgttcagtgatgcatgaagccctgcataaccactacacccagaaaagcctgtccctgtcccccgga

SEQ ID NO: 97 - DNA, 1617 bp, Artificial Sequence
  CL_ 17580 Full nt
caagtgggagcctgccctagcggcaagaaggcccgcgagatcgacgagtccctgatcttctacaagaagtgggagctggaggcatgcgtggacgccgccctgctggccacacagatggatagggtgaacgccatcccttttacctatgagcagctggatgtgctgaagcacaagctgccacagggacagggaggaggaggctccggaggaggcggcaactctccagggaccgcccggagcgacaatgtgcagggacagtctggacagggaggacaggtgcagctggtgcagagcggagccgaggtgaagaagcctggggccagcgtgaaggtgtcttgcaaggcctctggctacagcttcacaggctataccatgaattgggtgcggcaggccccaggacagggactggagtggatgggcctgatcacaccctacaacggggccagctcctataatcagaagtttcggggcaaggccaccatgacagtggacaccagcacatccaccgtgtacatggagctgtctagcctgagaagcgaggataccgccgtgtactattgtgccagaggcggctacgacggcagaggctttgattattggggccagggcacactggtgaccgtgtcctctgctagcactaaggggccttccgtgtttccactggctccctctagtaaatccacctctggaggcacagctgcactgggatgtctggtgaaggattacttccctgaaccagtcacagtgagttggaactcaggggctctgacaagtggagtccatacttttcccgcagtgctgcagtcaagcggactgtactccctgtcctctgtggtcaccgtgcctagttcaagcctgggcacccagacatatatctgcaacgtgaatcacaagccatcaaatacaaaagtcgacaagaaagtggagcccaagagctgtgataaaactcatacctgcccaccttgtccggcgccagaggcagcaggaggaccaagcgtgttcctgtttccacccaagcccaaagacaccctgatgattagccgaacccctgaagtcacatgcgtggtcgtgtccgtgtctcacgaggacccagaagtcaagttcaactggtacgtggatggcgtcgaggtgcataatgccaagacaaaaccccgggaggaacagtacaacagcacctatagagtcgtgtccgtcctgacagtgctgcaccaggattggctgaacggcaaggaatataagtgcaaagtgtccaataaggccctgcccgctcctatcgagaaaaccatttctaaggcaaaaggccagcctcgcgaaccacaggtctacgtgctgcctccatcccgggacgagctgacaaagaaccaggtctctctgctgtgcctggtgaaaggcttctatccatcagatattgctgtggagtgggaaagcaatgggcagcccgagaacaattacctgacttggccccctgtgctggactctgatgggagtttctttctgtattctaagctgaccgtggataaaagtaggtggcagcagggaaatgtctttagttgttcagtgatgcatgaagccctgcataaccactacacccagaaaagcctgtccctgtcccccgga

SEQ ID NO: 98 - DNA, 1617 bp, Artificial Sequence
  CL_ 17584 Full nt
caagtgggagcctgccctagcggcaagaaggcccgcgagatcgacgagtccctgatcttctacaagaagtgggagctggaggcatgcgtggacgccgccctgctggccacacagatggatagggtgaacgccatcccttttacctatgagcagctggatgtgctgaagcacaagctgccacagggacagggaggaggaggctccggaggaggcggcaactctccagggggcgggcgggtgaacaatgtgcagggacagtctggacagggaggacaggtgcagctggtgcagagcggagccgaggtgaagaagcctggggccagcgtgaaggtgtcttgcaaggcctctggctacagcttcacaggctataccatgaattgggtgcggcaggccccaggacagggactggagtggatgggcctgatcacaccctacaacggggccagctcctataatcagaagtttcggggcaaggccaccatgacagtggacaccagcacatccaccgtgtacatggagctgtctagcctgagaagcgaggataccgccgtgtactattgtgccagaggcggctacgacggcagaggctttgattattggggccagggcacactggtgaccgtgtcctctgctagcactaaggggccttccgtgtttccactggctccctctagtaaatccacctctggaggcacagctgcactgggatgtctggtgaaggattacttccctgaaccagtcacagtgagttggaactcaggggctctgacaagtggagtccatacttttcccgcagtgctgcagtcaagcggactgtactccctgtcctctgtggtcaccgtgcctagttcaagcctgggcacccagacatatatctgcaacgtgaatcacaagccatcaaatacaaaagtcgacaagaaagtggagcccaagagctgtgataaaactcatacctgcccaccttgtccggcgccagaggcagcaggaggaccaagcgtgttcctgtttccacccaagcccaaagacaccctgatgattagccgaacccctgaagtcacatgcgtggtcgtgtccgtgtctcacgaggacccagaagtcaagttcaactggtacgtggatggcgtcgaggtgcataatgccaagacaaaaccccgggaggaacagtacaacagcacctatagagtcgtgtccgtcctgacagtgctgcaccaggattggctgaacggcaaggaatataagtgcaaagtgtccaataaggccctgcccgctcctatcgagaaaaccatttctaaggcaaaaggccagcctcgcgaaccacaggtctacgtgctgcctccatcccgggacgagctgacaaagaaccaggtctctctgctgtgcctggtgaaaggcttctatccatcagatattgctgtggagtgggaaagcaatgggcagcccgagaacaattacctgacttggccccctgtgctggactctgatgggagtttctttctgtattctaagctgaccgtggataaaagtaggtggcagcagggaaatgtctttagttgttcagtgatgcatgaagccctgcataaccactacacccagaaaagcctgtccctgtcccccgga

SEQ ID NO: 99 - DNA, 1617 bp, Artificial Sequence
  CL_ 17586 Full nt
caagtgggagcctgcccttctggcaagaaggcccgcgagatcgacgagagcctgatcttctacaagaagtgggagctggaggcatgcgtggacgccgccctgctggccacacagatggatagggtgaacgccatcccttttacctatgagcagctggatgtgctgaagcacaagctgccacagggacagggaggaggaggcagcggcggaggaggcaattctccaatgagcgcccgcatcctgcaggtgcagggacagtccggacagggaggacaggtgcagctggtgcagtctggagccgaggtgaagaagcctggggccagcgtgaaggtgtcctgcaaggcctccggctactctttcacaggctataccatgaactgggtgcggcaggccccaggacagggactggagtggatgggcctgatcacaccctacaacggggccagctcctataatcagaagtttcggggcaaggccaccatgacagtggacaccagcacatccaccgtgtacatggagctgtctagcctgagatccgaggataccgccgtgtactattgtgccagaggcggctacgacggcagaggctttgattattggggccagggcacactggtgaccgtgtcctctgctagcactaaggggccttccgtgtttccactggctccctctagtaaatccacctctggaggcacagctgcactgggatgtctggtgaaggattacttccctgaaccagtcacagtgagttggaactcaggggctctgacaagtggagtccatacttttcccgcagtgctgcagtcaagcggactgtactccctgtcctctgtggtcaccgtgcctagttcaagcctgggcacccagacatatatctgcaacgtgaatcacaagccatcaaatacaaaagtcgacaagaaagtggagcccaagagctgtgataaaactcatacctgcccaccttgtccggcgccagaggcagcaggaggaccaagcgtgttcctgtttccacccaagcccaaagacaccctgatgattagccgaacccctgaagtcacatgcgtggtcgtgtccgtgtctcacgaggacccagaagtcaagttcaactggtacgtggatggcgtcgaggtgcataatgccaagacaaaaccccgggaggaacagtacaacagcacctatagagtcgtgtccgtcctgacagtgctgcaccaggattggctgaacggcaaggaatataagtgcaaagtgtccaataaggccctgcccgctcctatcgagaaaaccatttctaaggcaaaaggccagcctcgcgaaccacaggtctacgtgctgcctccatcccgggacgagctgacaaagaaccaggtctctctgctgtgcctggtgaaaggcttctatccatcagatattgctgtggagtgggaaagcaatgggcagcccgagaacaattacctgacttggccccctgtgctggactctgatgggagtttctttctgtattctaagctgaccgtggataaaagtaggtggcagcagggaaatgtctttagttgttcagtgatgcatgaagccctgcataaccactacacccagaaaagcctgtccctgtcccccgga

SEQ ID NO: 100 - DNA, 1617 bp, Artificial Sequence
  CL_ 17595 Full nt
caagtgggagcctgccctagcggcaagaaggcccgcgagatcgacgagtccctgatcttctacaagaagtgggagctggaggcatgcgtggacgccgccctgctggccacacagatggatagggtgaacgccatcccttttacctatgagcagctggatgtgctgaagcacaagctgccacagggacagggaggaggaggctccggaggaggcggcaactctccagggaaggggcggagcgcaaatgcccagggacagtctggacagggaggacaggtgcagctggtgcagagcggagccgaggtgaagaagcctggggccagcgtgaaggtgtcttgcaaggcctctggctacagcttcacaggctataccatgaattgggtgcggcaggccccaggacagggactggagtggatgggcctgatcacaccctacaacggggccagctcctataatcagaagtttcggggcaaggccaccatgacagtggacaccagcacatccaccgtgtacatggagctgtctagcctgagaagcgaggataccgccgtgtactattgtgccagaggcggctacgacggcagaggctttgattattggggccagggcacactggtgaccgtgtcctctgctagcactaaggggccttccgtgtttccactggctccctctagtaaatccacctctggaggcacagctgcactgggatgtctggtgaaggattacttccctgaaccagtcacagtgagttggaactcaggggctctgacaagtggagtccatacttttcccgcagtgctgcagtcaagcggactgtactccctgtcctctgtggtcaccgtgcctagttcaagcctgggcacccagacatatatctgcaacgtgaatcacaagccatcaaatacaaaagtcgacaagaaagtggagcccaagagctgtgataaaactcatacctgcccaccttgtccggcgccagaggcagcaggaggaccaagcgtgttcctgtttccacccaagcccaaagacaccctgatgattagccgaacccctgaagtcacatgcgtggtcgtgtccgtgtctcacgaggacccagaagtcaagttcaactggtacgtggatggcgtcgaggtgcataatgccaagacaaaaccccgggaggaacagtacaacagcacctatagagtcgtgtccgtcctgacagtgctgcaccaggattggctgaacggcaaggaatataagtgcaaagtgtccaataaggccctgcccgctcctatcgagaaaaccatttctaaggcaaaaggccagcctcgcgaaccacaggtctacgtgctgcctccatcccgggacgagctgacaaagaaccaggtctctctgctgtgcctggtgaaaggcttctatccatcagatattgctgtggagtgggaaagcaatgggcagcccgagaacaattacctgacttggccccctgtgctggactctgatgggagtttctttctgtattctaagctgaccgtggataaaagtaggtggcagcagggaaatgtctttagttgttcagtgatgcatgaagccctgcataaccactacacccagaaaagcctgtccctgtcccccgga

SEQ ID NO: 101 - DNA, 1617 bp, Artificial Sequence
  CL_ 17601 Full nt
caagtgggagcctgccctagcggcaagaaggcccgcgagatcgacgagtccctgatcttctacaagaagtgggagctggaggcatgcgtggacgccgccctgctggccacacagatggatagggtgaacgccatcccttttacctatgagcagctggatgtgctgaagcacaagctgccacagggacagggaggaggaggctccggaggaggcggcaactctccaatgagcgggcggagcgcaaatgcccagggacagtctggacagggaggacaggtgcagctggtgcagagcggagccgaggtgaagaagcctggggccagcgtgaaggtgtcttgcaaggcctctggctacagcttcacaggctataccatgaattgggtgcggcaggccccaggacagggactggagtggatgggcctgatcacaccctacaacggggccagctcctataatcagaagtttcggggcaaggccaccatgacagtggacaccagcacatccaccgtgtacatggagctgtctagcctgagaagcgaggataccgccgtgtactattgtgccagaggcggctacgacggcagaggctttgattattggggccagggcacactggtgaccgtgtcctctgctagcactaaggggccttccgtgtttccactggctccctctagtaaatccacctctggaggcacagctgcactgggatgtctggtgaaggattacttccctgaaccagtcacagtgagttggaactcaggggctctgacaagtggagtccatacttttcccgcagtgctgcagtcaagcggactgtactccctgtcctctgtggtcaccgtgcctagttcaagcctgggcacccagacatatatctgcaacgtgaatcacaagccatcaaatacaaaagtcgacaagaaagtggagcccaagagctgtgataaaactcatacctgcccaccttgtccggcgccagaggcagcaggaggaccaagcgtgttcctgtttccacccaagcccaaagacaccctgatgattagccgaacccctgaagtcacatgcgtggtcgtgtccgtgtctcacgaggacccagaagtcaagttcaactggtacgtggatggcgtcgaggtgcataatgccaagacaaaaccccgggaggaacagtacaacagcacctatagagtcgtgtccgtcctgacagtgctgcaccaggattggctgaacggcaaggaatataagtgcaaagtgtccaataaggccctgcccgctcctatcgagaaaaccatttctaaggcaaaaggccagcctcgcgaaccacaggtctacgtgctgcctccatcccgggacgagctgacaaagaaccaggtctctctgctgtgcctggtgaaaggcttctatccatcagatattgctgtggagtgggaaagcaatgggcagcccgagaacaattacctgacttggccccctgtgctggactctgatgggagtttctttctgtattctaagctgaccgtggataaaagtaggtggcagcagggaaatgtctttagttgttcagtgatgcatgaagccctgcataaccactacacccagaaaagcctgtccctgtcccccgga

SEQ ID NO: 102 - DNA, 918 bp, Artificial Sequence
  CL_ 17871 Full nt
atctgggagctgaagaaggacgtgtacgtggtggagctggactggtatccagatgcaccaggagagatggtggtgctgacctgcgacacaccagaggaggatggcatcacctggacactggaccagagctccgaggtgctgggcagcggcaagaccctgacaatccaggtgaaggagttcggcgatgccggacagtacacatgtcacaagggcggcgaggtgctgtctcacagcctgctgctgctgcacaagaaggaggatggcatctggtccacagacatcctgaaggatcagaaggagcccaagaacaagaccttcctgaggtgcgaggccaagaattattctggccgctttacctgttggtggctgaccacaatctctaccgacctgaccttcagcgtgaagtctagccggggctcctctgatcctcagggagtgacatgcggagccgccaccctgagcgccgagcgggtgagaggcgacaacaaggagtacgagtatagcgtggagtgccaggaggattccgcctgtcccgccgccgaggagtccctgcctatcgaagtgatggtggacgccgtgcacaagctgaagtacgagaattatacaagctccttctttatcagggacatcatcaagccagatccccctaagaacctgcagctgaagcccctgaagaacagcagacaggtggaggtgtcttgggagtaccctgatacctggtccacaccacacagctatttctccctgaccttttgcgtgcaggtgcagggcaagtctaagcgggagaagaaggacagagtgtttaccgataagacaagcgccaccgtgatctgtagaaagaacgcctccatctctgtgagggcccaggaccgctactattctagctcctggtctgagtgggccagcgtgccttgttcc

SEQ ID NO: 103 - DNA, 591 bp, Artificial Sequence
  CL_ 17872 Full nt
agaaacctgcccgtggccacacccgatcctggcatgtttccctgcctgcaccacagccagaacctgctgcgggccgtgtccaatatgctgcagaaggccagacagaccctggagttctacccctgtacatctgaggagatcgaccacgaggatatcaccaaggacaagacctccacagtggaggcctgcctgcctctggagctgacaaagaacgagtcctgtctgaacagccgggagaccagcttcatcacaaatggctcctgcctggcctctcgcaagaccagctttatgatggccctgtgcctgagctccatctacgaggatctgaagatgtatcaggtggagttcaagacaatgaacgccaagctgctgatggaccctaagcggcagatctttctggatcagaatatgctggccgtgatcgacgagctgatgcaggccctgaactttaatagcgagaccgtgcctcagaagtctagcctggaggagccagatttctacaagacaaagatcaagctgtgcatcctgctgcacgccttccggatcagagccgtgaccatcgacagagtgatgtcctatctgaacgcctct

SEQ ID NO: 104 - DNA, 1284 bp, Artificial Sequence
  CL_ 17875 Full nt
gagccaaagagctccgacaagacccacacatgccccccttgtccggcgccagaggctgcaggaggaccaagcgtgttcctgtttccacccaagcctaaagacacactgatgatttcccgaacccccgaagtcacatgcgtggtcgtgtctgtgagtcacgaggaccctgaagtcaagttcaactggtacgtggatggcgtcgaggtgcataatgccaagactaaacctagggaggaacagtacaactcaacctatcgcgtcgtgagcgtcctgacagtgctgcaccaggattggctgaacggcaaagaatataagtgcaaagtgagcaataaggccctgcccgctcctatcgagaaaaccatttccaaggctaaagggcagcctcgcgaacctcaggtgtacgtgtatcccccttccagagatgagctgaccaagaaccaggtgtctctgacatgcctggtgaagggcttctaccctagcgacatcgccgtggagtgggagtccaatggccagccagagaacaattataagaccacaccacccgtgctggacagcgatggctccttcgccctggtgtccaagctgaccgtggataagtctaggtggcagcagggcaacgtgttttcctgttctgtgatgcacgaggccctgcacaatcactacacccagaagagcctgtccctgtctcccggcagaaacctgcctgtggccacacctgacccaggcatgttcccatgcctgcaccactctcagaacctgctgagggccgtgagcaatatgctgcagaaggcccgccagaccctggagttttatccctgtacatccgaggagatcgaccacgaggatatcaccaaggataagaccagcacagtggaggcctgcctgcctctggagctgacaaagaacgagtcttgtctgaatagccgggagacctccttcatcacaaatggctcttgcctggccagcagaaagacctcctttatgatggccctgtgcctgagctccatctacgaggacctgaagatgtatcaggtggagttcaagacaatgaacgccaagctgctgatggaccccaagcggcagatctttctggatcagaatatgctggccgtgatcgacgagctgatgcaggccctgaactttaattccgagaccgtgccacagaagtctagcctggaggagcccgatttctacaagacaaagatcaagctgtgcatcctgctgcacgcctttcggatcagagccgtgaccatcgacagagtgatgtcttatctgaacgccagc

SEQ ID NO: 105 - DNA, 2265 bp, Artificial Sequence
  CL_ 17876 Full nt
gagccaaagagctccgacaagacccacacatgccccccttgtccggcgccagaggctgcaggaggaccaagcgtgttcctgtttccacccaagcctaaagacacactgatgatttcccgaacccccgaagtcacatgcgtggtcgtgtctgtgagtcacgaggaccctgaagtcaagttcaactggtacgtggatggcgtcgaggtgcataatgccaagactaaacctagggaggaacagtacaactcaacctatcgcgtcgtgagcgtcctgacagtgctgcaccaggattggctgaacggcaaagaatataagtgcaaagtgagcaataaggccctgcccgctcctatcgagaaaaccatttccaaggctaaagggcagcctcgcgaacctcaggtgtacgtgtatccaccctcccgcgatgagctgacaaagaaccaggtgtctctgacctgtctggtgaagggcttttaccctagcgacatcgccgtggagtgggagtccaatggccagccagagaacaattataagaccacacctccagtgctggactctgatggcagcttcgccctggtgtctaagctgacagtggacaagagcagatggcagcagggcaacgtgttttcttgtagcgtgatgcacgaggccctgcacaatcactacacccagaagtccctgagcttaagccctggaggcagcgccgatggaggaatctgggagctgaagaaggacgtgtacgtggtggagctggactggtatccagatgcaccaggagagatggtggtgctgacctgcgacacaccagaggaggatggcatcacctggacactggatcagagctccgaggtgctgggctccggcaagaccctgacaatccaggtgaaggagttcggcgacgccggacagtacacctgtcacaagggcggcgaggtgctgtcccactctctgctgctgctgcacaagaaggaggacggcatctggagcacagacatcctgaaggatcagaaggagcccaagaacaagaccttcctgaggtgcgaggccaagaattatagcggcagattcacctgttggtggctgaccacaatctccaccgatctgacattttctgtgaagtctagcaggggctcctctgaccctcagggagtgacatgcggagccgccaccctgagcgccgagcgggtgagaggcgataacaaggagtacgagtattccgtggagtgccaggaggactctgcctgtcccgccgccgaggagtccctgcctatcgaagtgatggtggatgccgtgcacaagctgaagtacgagaattatacaagctccttctttatcagggacatcatcaagcccgatccccctaagaacctgcagctgaagcctctgaagaatagccgccaggtggaggtgtcctgggagtaccctgacacctggagcacaccacactcctatttctctctgaccttttgcgtgcaggtgcagggcaagtctaagagggagaagaaggaccgcgtgttcaccgataagacaagcgccaccgtgatctgtcggaagaacgccagcatctccgtgcgggcccaggatagatactattctagctcctggagcgagtgggcctccgtgccatgttctggaggaggaggcagcggcggaggaggctccggcggcggcggctctagaaatctgccagtggccacccctgacccaggcatgttcccctgcctgcaccactctcagaacctgctgcgggccgtgagcaatatgctgcagaaggccagacagacactggagttttacccatgtacctccgaggagatcgaccacgaggatatcacaaaggataagacctctacagtggaggcatgcctgccactggagctgaccaagaacgagagctgtctgaacagccgggagacatctttcatcaccaacggcagctgcctggcctccagaaagacatcttttatgatggccctgtgcctgtctagcatctacgaggacctgaagatgtatcaggtggagttcaagaccatgaacgccaagctgctgatggaccctaagaggcagatctttctggatcagaatatgctggccgtgatcgacgagctgatgcaggccctgaacttcaatagcgagacagtgccacagaagtcctctctggaggagcccgatttctacaagaccaagatcaagctgtgcatcctgctgcacgccttccggatcagagccgtgaccatcgaccgcgtgatgagctacctgaacgccagc

SEQ ID NO: 106 - DNA, 1314 bp, Artificial Sequence
  CL_ 17877 Full nt
agaaacctgccagtggccacaccagatcccggcatgtttccatgcctgcaccactcccagaacctgctgcgggccgtgtctaatatgctgcagaaggccagacagaccctggagttctacccatgtacaagcgaggagatcgaccacgaggatatcaccaaggacaagacctccacagtggaggcatgcctgccactggagctgacaaagaacgagagctgtctgaacagccgggagaccagcttcatcacaaatggcagctgcctggcctcccgcaagacctcttttatgatggccctgtgcctgagctccatctacgaggatctgaagatgtatcaggtggagttcaagacaatgaacgccaagctgctgatggaccccaagcggcagatctttctggatcagaatatgctggccgtgatcgacgagctgatgcaggccctgaactttaatagcgagaccgtgccccagaagtctagcctggaggagcctgatttctacaagacaaagatcaagctgtgcatcctgctgcacgccttccggatcagagccgtgaccatcgacagagtgatgagctatctgaacgcctccggaggaggaggctctggaggaggcggcagcgagcctaagtcctctgacaagacccacacatgccccccttgtccggcgccagaggctgcaggaggaccaagcgtgttcctgtttccacccaagcctaaagacacactgatgatttcccgaacccccgaagtcacatgcgtggtcgtgtctgtgagtcacgaggaccctgaagtcaagttcaactggtacgtggatggcgtcgaggtgcataatgccaagactaaacctagggaggaacagtacaactcaacctatcgcgtcgtgagcgtcctgacagtgctgcaccaggattggctgaacggcaaagaatataagtgcaaagtgagcaataaggccctgcccgctcctatcgagaaaaccatttccaaggctaaagggcagcctcgcgaaccacaggtctacgtgtatcctccaagccgggacgagctgacaaagaaccaggtctccctgacttgtctggtgaaagggttttaccctagtgatatcgctgtggagtgggaatcaaatggacagccagagaacaattataagactaccccccctgtgctggacagtgatgggtcattcgcactggtctccaagctgacagtggacaaatctcggtggcagcagggaaatgtcttttcatgtagcgtgatgcatgaagcactgcacaaccattacacccagaagtcactgtcactgtcaccagga

SEQ ID NO: 107 - DNA, 1641 bp, Artificial Sequence
  CL_ 17879 Full nt
atctgggagctgaagaaggacgtgtacgtggtggagctggactggtatcctgatgccccaggcgagatggtggtgctgacctgcgacacacccgaggaggatggcatcacctggacactggaccagagctccgaggtgctgggcagcggcaagaccctgacaatccaggtgaaggagttcggcgatgccggacagtacacatgtcacaagggcggcgaggtgctgtcccactctctgctgctgctgcacaagaaggaggatggcatctggtctacagacatcctgaaggatcagaaggagcctaagaacaagaccttcctgaggtgcgaggccaagaattatagcggcagattcacctgttggtggctgaccacaatcagcaccgacctgacattttccgtgaagtctagccggggctcctctgatccacagggagtgacatgcggagccgccaccctgagcgccgagcgggtgagaggcgacaacaaggagtacgagtattccgtggagtgccaggaggattctgcctgtccagccgccgaggagtccctgccaatcgaagtgatggtggacgccgtgcacaagctgaagtacgagaattatacaagctccttctttatcagggacatcatcaagcctgatccccctaagaacctgcagctgaagcccctgaagaacagcagacaggtggaggtgagctgggagtaccccgatacctggagcacacctcactcttatttcagcctgaccttttgcgtgcaggtgcagggcaagagcaagcgggagaagaaggacagagtgtttaccgataagacatccgccaccgtgatctgtagaaagaacgccagcatctccgtgagggcacaggaccgctactattctagctcctggtccgagtgggcctctgtgccctgtagcggaggaggaggctccggaggaggaggctctgagcctaagtctagcgataagacccacacatgcccaccctgtccggcgccagaggctgcaggaggaccaagcgtgttcctgtttccacccaagcctaaagacacactgatgatttcccgaacccccgaagtcacatgcgtggtcgtgtctgtgagtcacgaggaccctgaagtcaagttcaactggtacgtggatggcgtcgaggtgcataatgccaagactaaacctagggaggaacagtacaactcaacctatcgcgtcgtgagcgtcctgacagtgctgcaccaggattggctgaacggcaaagaatataagtgcaaagtgagcaataaggccctgcccgctcctatcgagaaaaccatttccaaggctaaagggcagcctcgcgaaccacaggtctacgtgtatcctccaagccgggacgagctgacaaagaaccaggtctccctgacttgtctggtgaaagggttttaccctagtgatatcgctgtggagtgggaatcaaatggacagccagagaacaattataagactaccccccctgtgctggacagtgatgggtcattcgcactggtctccaagctgacagtggacaaatctcggtggcagcagggaaatgtcttttcatgtagcgtgatgcatgaagcactgcacaaccattacacccagaagtcactgtcactgtcaccagga

SEQ ID NO: 108 - DNA, 1641 bp, Artificial Sequence
  CL_ 17880 Full nt
gagccaaagagctccgacaagacccacacatgccccccttgtccggcgccagaggcagcaggaggaccaagcgtgttcctgtttccacccaagcccaaagacaccctgatgattagccgaacccctgaagtcacatgcgtggtcgtgtccgtgtctcacgaggacccagaagtcaagttcaactggtacgtggatggcgtcgaggtgcataatgccaagacaaaaccccgggaggaacagtacaacagcacctatagagtcgtgtccgtcctgacagtgctgcaccaggattggctgaacggcaaggaatataagtgcaaagtgtccaataaggccctgcccgctcctatcgagaaaaccatttctaaggcaaaaggccagcctcgcgagcctcaggtgtacgtgctgccaccttcccgcgacgagctgaccaagaaccaggtgtctctgctgtgcctggtgaagggcttttatcctagcgatatcgccgtggagtgggagtccaatggccagccagagaacaattacctgacctggccacccgtgctggactctgatggcagcttctttctgtattccaagctgacagtggacaagtctcggtggcagcagggcaacgtgttctcttgtagcgtgatgcacgaggccctgcacaatcactacacccagaagtccctgagcttaagccctggaggaggaggaggctctggaggaggaggcagcatctgggagctgaagaaggacgtgtacgtggtggagctggactggtatccagatgcaccaggagagatggtggtgctgacctgcgacacaccagaggaggatggcatcacctggacactggaccagagctccgaggtgctgggcagcggcaagaccctgacaatccaggtgaaggagttcggcgatgccggacagtacacatgtcacaagggcggcgaggtgctgtctcacagcctgctgctgctgcacaagaaggaggatggcatctggagcacagacatcctgaaggatcagaaggagcccaagaacaagaccttcctgaggtgcgaggccaagaattatagcggcagattcacctgttggtggctgaccacaatctccaccgacctgacattttctgtgaagtctagcaggggctcctctgatcctcagggagtgacatgcggagccgccaccctgtctgccgagcgggtgagaggcgacaacaaggagtacgagtattctgtggagtgccaggaggatagcgcctgtcccgccgccgaggagtccctgcctatcgaagtgatggtggacgccgtgcacaagctgaagtacgagaattatacaagctccttctttatccgggacatcatcaagccagatccccctaagaacctgcagctgaagcccctgaagaatagcagacaggtggaggtgtcctgggagtaccctgatacctggtccacaccacacagctatttctccctgaccttttgcgtgcaggtgcagggcaagtccaagcgggagaagaaggacagagtgttcaccgataagacatctgccaccgtgatctgtcggaagaacgcctccatctctgtgagggcccaggaccgctactattctagctcctggtctgagtgggccagcgtgccctgttcc

SEQ ID NO: 109 - DNA, 1284 bp, Artificial Sequence
  CL_ 17881 Full nt
gagccaaagagctccgacaagacccacacatgccccccttgtccggcgccagaggcagcaggaggaccaagcgtgttcctgtttccacccaagcccaaagacaccctgatgattagccgaacccctgaagtcacatgcgtggtcgtgtccgtgtctcacgaggacccagaagtcaagttcaactggtacgtggatggcgtcgaggtgcataatgccaagacaaaaccccgggaggaacagtacaacagcacctatagagtcgtgtccgtcctgacagtgctgcaccaggattggctgaacggcaaggaatataagtgcaaagtgtccaataaggccctgcccgctcctatcgagaaaaccatttctaaggcaaaaggccagcctcgcgagcctcaggtgtacgtgctgccaccttcccgcgacgagctgaccaagaaccaggtgtctctgctgtgcctggtgaagggcttttatcctagcgatatcgccgtggagtgggagtccaatggccagccagagaacaattacctgacctggccacccgtgctggactctgatggcagcttctttctgtattccaagctgacagtggacaagtctcggtggcagcagggcaacgtgttctcttgtagcgtgatgcacgaggccctgcacaatcactacacccagaagtccctgagcttaagcccaggccggaacctgccagtggccacccccgatcctggcatgttcccatgcctgcaccacagccagaacctgctgagggccgtgtccaatatgctgcagaaggcccgccagaccctggagttttacccctgtacatctgaggagatcgaccacgaggatatcaccaaggacaagacctccacagtggaggcctgcctgcctctggagctgacaaagaacgagtcctgtctgaacagccgggagaccagcttcatcacaaatggctcctgcctggcctctagaaagaccagctttatgatggccctgtgcctgagctccatctacgaggatctgaagatgtatcaggtggagttcaagacaatgaacgccaagctgctgatggaccccaagaggcagatctttctggatcagaatatgctggccgtgatcgacgagctgatgcaggccctgaacttcaatagcgagaccgtgcctcagaagtctagcctggaggagccagatttctacaagacaaagatcaagctgtgcatcctgctgcacgcctttcggatcagagccgtgacaatcgaccgcgtgatgtcctatctgaacgcctct

SEQ ID NO: 110 - DNA, 1203 bp, Artificial Sequence
  CL_ 17906 Full nt
gagccaaagagctccgacaagacccacacatgccccccttgtccggcgccagaggctgcaggaggaccaagcgtgttcctgtttccacccaagcctaaagacacactgatgatttcccgaacccccgaagtcacatgcgtggtcgtgtctgtgagtcacgaggaccctgaagtcaagttcaactggtacgtggatggcgtcgaggtgcataatgccaagactaaacctagggaggaacagtacaactcaacctatcgcgtcgtgagcgtcctgacagtgctgcaccaggattggctgaacggcaaagaatataagtgcaaagtgagcaataaggccctgcccgctcctatcgagaaaaccatttccaaggctaaagggcagcctcgcgaaccccaggtgtacgtgtatcccccttctcgggacgagctgaccaagaaccaggtgagcctgacatgcctggtgaagggcttctacccatccgatatcgccgtggagtgggagtctaatggccagcccgagaacaattataagaccacaccacccgtgctggactccgatggctctttcgccctggtgtctaagctgaccgtggacaagagcaggtggcagcagggcaacgtgttttcctgctctgtgatgcacgaggccctgcacaatcactacacccagaagagcctgagcttaagccctggcagggcagtgccaggaggcagctcccccgcctggacccagtgccagcagctgagccagaagctgtgcacactggcctggtccgcccacccactggtgggacacatggacctgagagaggagggcgatgaggagaccacaaacgacgtgcctcacatccagtgcggcgacggctgtgatccacagggcctgagggataattctcagttctgcctgcagcgcatccaccagggcctgatcttctacgagaagctgctgggcagcgatatctttaccggagagccatctctgctgccagacagccctgtgggacagctgcacgcctccctgctgggcctgtctcagctgctgcagccagagggacaccactgggagacacagcagatcccttctctgagcccatcccagccatggcagcggctgctgctgcggttcaagatcctgcggtccctgcaggccttcgtggcagtggcagcaagagtgtttgcacacggagccgccaccctgtctcct

SEQ ID NO: 111 - DNA, 1233 bp, Artificial Sequence
  CL_ 17907 Full nt
agagcagtgccaggcggcagctcccctgcctggacccagtgccagcagctgtcccagaagctgtgcacactggcctggtctgcccaccctctggtgggacacatggacctgcgggaggagggcgatgaggagaccacaaacgacgtgccacacatccagtgcggcgacggatgtgatccacagggcctgcgggataatagccagttctgcctgcagagaatccaccagggcctgatcttctacgagaagctgctgggctccgatatctttaccggagagccatccctgctgccagactctccagtgggacagctgcacgccagcctgctgggcctgtcccagctgctgcagcctgagggccaccactgggagacacagcagatcccatccctgtctcctagccagccatggcagaggctgctgctgcgctttaagatcctgaggtctctgcaggccttcgtggcagtggcagcacgcgtgtttgcccacggagccgccacactgagcccaggaggaggaggctctggaggaggaggcagcgagcctaagtctagcgacaagacccacacatgccccccttgtccggcgccagaggctgcaggaggaccaagcgtgttcctgtttccacccaagcctaaagacacactgatgatttcccgaacccccgaagtcacatgcgtggtcgtgtctgtgagtcacgaggaccctgaagtcaagttcaactggtacgtggatggcgtcgaggtgcataatgccaagactaaacctagggaggaacagtacaactcaacctatcgcgtcgtgagcgtcctgacagtgctgcaccaggattggctgaacggcaaagaatataagtgcaaagtgagcaataaggccctgcccgctcctatcgagaaaaccatttccaaggctaaagggcagcctcgcgaaccacaggtctacgtgtatcctccaagccgggacgagctgacaaagaaccaggtctccctgacttgtctggtgaaagggttttaccctagtgatatcgctgtggagtgggaatcaaatggacagccagagaacaattataagactaccccccctgtgctggacagtgatgggtcattcgcactggtctccaagctgacagtggacaaatctcggtggcagcagggaaatgtcttttcatgtagcgtgatgcatgaagcactgcacaaccattacacccagaagtcactgtcactgtcaccagga

SEQ ID NO: 112 - DNA, 510 bp, Artificial Sequence
  CL_ 17908 Full nt
agagccgtgcctggcggcagctccccagcctggacccagtgccagcagctgagccagaagctgtgcacactggcctggtccgcccacccactggtgggacacatggacctgcgggaggagggcgatgaggagaccacaaacgacgtgccacacatccagtgcggcgacggatgtgatcctcagggcctgcgggataattctcagttctgcctgcagagaatccaccagggcctgatcttctacgagaagctgctgggcagcgatatctttaccggagagccttctctgctgccagacagccctgtgggacagctgcacgcctccctgctgggcctgtctcagctgctgcagccagagggccaccactgggagacacagcagatcccctctctgagcccatcccagccatggcagaggctgctgctgcgctttaagatcctgaggtccctgcaggccttcgtggcagtggcagcacgcgtgtttgcccacggagccgccacactgtctccc

SEQ ID NO: 113 - DNA, 1641 bp, Artificial Sequence
  CL_ 17942 Full nt
gagccaaagagctccgacaagacccacacatgccccccttgtccggcgccagaggctgcaggaggaccaagcgtgttcctgtttccacccaagcctaaagacacactgatgatttcccgaacccccgaagtcacatgcgtggtcgtgtctgtgagtcacgaggaccctgaagtcaagttcaactggtacgtggatggcgtcgaggtgcataatgccaagactaaacctagggaggaacagtacaactcaacctatcgcgtcgtgagcgtcctgacagtgctgcaccaggattggctgaacggcaaagaatataagtgcaaagtgagcaataaggccctgcccgctcctatcgagaaaaccatttccaaggctaaagggcagcctcgcgaaccccaggtgtacgtgtatcccccttctcgggacgagctgaccaagaaccaggtgagcctgacatgcctggtgaagggcttctacccatccgatatcgccgtggagtgggagtctaatggccagcccgagaacaattataagaccacaccacccgtgctggactccgatggctctttcgccctggtgtctaagctgaccgtggacaagagcaggtggcagcagggcaacgtgttttcctgctctgtgatgcacgaggccctgcacaatcactacacccagaagagcctgagcttaagccctggaggaggaggaggctctggaggaggaggcagcatctgggagctgaagaaggacgtgtacgtggtggagctggactggtatccagatgcaccaggagagatggtggtgctgacctgcgacacaccagaggaggatggcatcacctggacactggaccagagctccgaggtgctgggcagcggcaagaccctgacaatccaggtgaaggagttcggcgatgccggacagtacacatgtcacaagggcggcgaggtgctgtctcacagcctgctgctgctgcacaagaaggaggatggcatctggagcacagacatcctgaaggatcagaaggagcccaagaacaagaccttcctgaggtgcgaggccaagaattatagcggcagattcacctgttggtggctgaccacaatctccaccgacctgacattttctgtgaagtctagcaggggctcctctgatcctcagggagtgacatgcggagccgccaccctgtctgccgagcgggtgagaggcgacaacaaggagtacgagtattctgtggagtgccaggaggatagcgcctgtcccgccgccgaggagtccctgcctatcgaagtgatggtggacgccgtgcacaagctgaagtacgagaattatacaagctccttctttatccgggacatcatcaagccagatccccctaagaacctgcagctgaagcccctgaagaatagcagacaggtggaggtgtcctgggagtaccctgatacctggtccacaccacacagctatttctccctgaccttttgcgtgcaggtgcagggcaagtccaagcgggagaagaaggacagagtgttcaccgataagacatctgccaccgtgatctgtcggaagaacgcctccatctctgtgagggcccaggaccgctactattctagctcctggtctgagtgggccagcgtgccctgttcc

SEQ ID NO: 114 - DNA, 2199 bp, Artificial Sequence
  CL_ 17945 Full nt
gagccaaagagctccgacaagacccacacatgccccccttgtccggcgccagaggctgcaggaggaccaagcgtgttcctgtttccacccaagcctaaagacacactgatgatttcccgaacccccgaagtcacatgcgtggtcgtgtctgtgagtcacgaggaccctgaagtcaagttcaactggtacgtggatggcgtcgaggtgcataatgccaagactaaacctagggaggaacagtacaactcaacctatcgcgtcgtgagcgtcctgacagtgctgcaccaggattggctgaacggcaaagaatataagtgcaaagtgagcaataaggccctgcccgctcctatcgagaaaaccatttccaaggctaaagggcagcctcgcgaaccccaggtgtacgtgtatcccccttctcgggacgagctgaccaagaaccaggtgagcctgacatgcctggtgaagggcttctacccatccgatatcgccgtggagtgggagtctaatggccagcccgagaacaattataagaccacaccacccgtgctggactccgatggctctttcgccctggtgtctaagctgaccgtggacaagagcaggtggcagcagggcaacgtgttttcctgctctgtgatgcacgaggccctgcacaatcactacacccagaagagcctgagcttaagcccaggaggctccgccgatggaggaatctgggagctgaagaaggacgtgtacgtggtggagctggactggtatccagatgcaccaggagagatggtggtgctgacctgcgacacacccgaggaggatggcatcacctggacactggatcagagctccgaggtgctgggcagcggcaagaccctgacaatccaggtgaaggagttcggcgacgccggacagtacacatgtcacaagggcggcgaggtgctgtcccactctctgctgctgctgcacaagaaggaggacggcatctggtctacagacatcctgaaggatcagaaggagcctaagaacaagaccttcctgcggtgcgaggccaagaattatagcggcagattcacctgttggtggctgaccacaatcagcaccgatctgacattttccgtgaagtctagcaggggctcctctgacccacagggagtgacatgcggagccgccaccctgtccgccgagcgggtgagaggcgataacaaggagtacgagtattccgtggagtgccaggaggactctgcctgtcccgccgccgaggagagcctgcctatcgaagtgatggtggatgccgtgcacaagctgaagtacgagaattatacaagctccttctttatcagggacatcatcaagccagatccccctaagaacctgcagctgaagcccctgaagaacagcagacaggtggaggtgagctgggagtaccctgacacctggtccacaccacactcttatttcagcctgaccttttgcgtgcaggtgcagggcaagtctaagagggagaagaaggaccgcgtgttcaccgataagacaagcgccaccgtgatctgtagaaagaacgccagcatctccgtgagggcccaggatcgctactattctagctcctggtccgagtgggcctctgtgccctgcagcggaggaggaggctccggaggaggaggctctggcggcggcggcagcggaggcggcggctcccgggccgtgccaggaggctctagccccgcctggacacagtgccagcagctgagccagaagctgtgcaccctggcctggtccgcccaccctctggtgggacacatggacctgagagaggagggcgatgaggagaccacaaacgacgtgcctcacatccagtgcggcgacggctgtgatccacagggcctgagggacaattcccagttctgtctgcagcgcatccaccagggcctgatcttctacgagaagctgctgggctctgatatctttacaggcgagccctctctgctgcctgacagcccagtgggacagctgcacgcctccctgctgggcctgtctcagctgctgcagccagagggacaccactgggagacccagcagatcccttctctgagcccatcccagccttggcagcggctgctgctgcggttcaagatcctgcggagcctgcaggccttcgtggcagtggcagcaagagtgtttgcacatggagccgccaccctgtccccc

SEQ ID NO: 115 - DNA, 1332 bp, Artificial Sequence
  CL_ 18939 Full nt
caggtgcagctggtggagtccggcggcggcgtggtgcagccaggccggtccctgagactgtcttgcgcagccagcggcttcaccttcagctcctacggcatgcactgggtgcggcaggcccccggcaagggactggagtgggtggccttcatcagatatgacggcagcaacaagtactatgccgattccgtgaagggcaggtttaccatctcccgcgacaactctaagaatacactgtacctgcagatgaactctctgcgggccgaggacaccgccgtgtactattgtaagacacacggcagccacgataattggggccagggcaccatggtgacagtgtctagcgctagcactaaggggccttcagtgtttccactggcacccagttcaaaatcaacaagcggaggaactgccgctctgggatgtctggtgaaggactatttcccagagccagtcaccgtgagctggaactccggcgcactgacttccggagtccacacctttccagccgtgctgcagagctccggactgtactctctgtctagtgtggtcacagtgccttcaagctccctgggcacccagacatatatctgcaacgtgaatcacaagcctagtaatactaaggtcgacaaacgcgtggaaccaaagagctgtgataaaactcatacctgccccccttgtccggcgccagaggcagcaggaggaccaagcgtgttcctgtttccacccaagcccaaagacaccctgatgattagccgaacccctgaagtcacatgcgtggtcgtgtccgtgtctcacgaggacccagaagtcaagttcaactggtacgtggatggcgtcgaggtgcataatgccaagacaaaaccccgggaggaacagtacaacagcacctatagagtcgtgtccgtcctgacagtgctgcaccaggattggctgaacggcaaggaatataagtgcaaagtgtccaataaggccctgcccgctcctatcgagaaaaccatttctaaggcaaaaggccagcctcgcgaaccacaggtctacgtgctgcctccatcccgggacgagctgacaaagaaccaggtctctctgctgtgcctggtgaaaggcttctatccatcagatattgctgtggagtgggaaagcaatgggcagcccgagaacaattacctgacttggccccctgtgctggactctgatgggagtttctttctgtattctaagctgaccgtggataaaagtaggtggcagcagggaaatgtctttagttgttcagtgatgcatgaagccctgcataaccactacacccagaaaagcctgtccctgtcccccgga

SEQ ID NO: 116 - DNA, 651 bp, Artificial Sequence
  CL_ 18940 Full nt
cagtccgtgctgacccagccacctagcgtgtccggagcccccggccagagggtgacaatctcttgcagcggctcccgctctaacatcggctctaataccgtgaagtggtaccagcagctgccaggcacagcccccaagctgctgatctactataacgaccagcggcctagcggcgtgccagatagattcagcggctccaagtctggcaccagcgcctccctggccatcacaggactgcaggcagaggacgaggcagattactattgtcagtcttacgaccggtatacccaccccgccctgctgtttggaaccggaacaaaggtgacagtgctgggccagcctaaggcggcgcccagcgtgactctgtttccacccagctccgaggaactgcaggccaataaggctaccctggtctgtctgatttccgacttctaccccggggctgtgacagtcgcatggaaggccgattctagtcctgtgaaagcaggagtcgagaccacaactccatcaaagcagagcaacaacaagtacgcagcctcaagctatctgtctctgacacctgaacagtggaaaagccaccggtcttatagttgtcaggtgactcacgagggctcaacagtggaaaagacagtcgcacccgcagaatgctca

SEQ ID NO: 117 - DNA, 1422 bp, Artificial Sequence
  CL_ 18942 Full nt
caggtgcagctggtggagagcggcggcggcgtggtgcagcctggccggtccctgagactgtcttgcgcagccagcggcttcacctttagctcctacggcatgcactgggtgcggcaggcccctggcaagggactggagtgggtggccttcatcagatatgacggctctaacaagtactatgccgatagcgtgaagggcaggtttaccatctcccgcgacaactctaagaatacactgtacctgcagatgaactccctgcgggcagaggacaccgccgtgtactattgcaagacacacggctctcacgataattggggccagggcaccatggtgacagtgtctagcggaggaggaggcagcggaggaggaggctccggcggcggcggcagccagtccgtgctgacccagccaccttctgtgagcggagcccccggacagagggtgacaatctcctgttctggcagccgctccaacatcggcagcaataccgtgaagtggtatcagcagctgcctggcacagccccaaagctgctgatctactataatgaccagagaccctccggcgtgcctgatagattctctggcagcaagtccggcacctctgccagcctggccatcacaggactgcaggcagaggacgaggcagattactattgtcagtcctacgacagatatacccacccagccctgctgtttggcaccggcacaaaggtgacagtgctggccgccgagcccaagtcctctgataagacccacacatgcccaccctgtccggcgccagaggcagcaggaggaccaagcgtgttcctgtttccacccaagcccaaagacaccctgatgattagccgaacccctgaagtcacatgcgtggtcgtgtccgtgtctcacgaggacccagaagtcaagttcaactggtacgtggatggcgtcgaggtgcataatgccaagacaaaaccccgggaggaacagtacaacagcacctatagagtcgtgtccgtcctgacagtgctgcaccaggattggctgaacggcaaggaatataagtgcaaagtgtccaataaggccctgcccgctcctatcgagaaaaccatttctaaggcaaaaggccagcctcgcgaaccacaggtctacgtgctgcctccatcccgggacgagctgacaaagaaccaggtctctctgctgtgcctggtgaaaggcttctatccatcagatattgctgtggagtgggaaagcaatgggcagcccgagaacaattacctgacttggccccctgtgctggactctgatgggagtttctttctgtattctaagctgaccgtggataaaagtaggtggcagcagggaaatgtctttagttgttcagtgatgcatgaagccctgcataaccactacacccagaaaagcctgtccctgtcccccgga

SEQ ID NO: 118 - DNA, 1422 bp, Artificial Sequence
  CL_ 18943 Full nt
cagtccgtgctgacccagccacctagcgtgtccggagcccccggccagagggtgacaatctcttgcagcggctcccgctctaacatcggctctaataccgtgaagtggtaccagcagctgcctggcacagccccaaagctgctgatctactataacgaccagagacccagcggcgtgcctgatagattcagcggctccaagtctggcaccagcgcctccctggccatcacaggactgcaggcagaggacgaggcagattactattgccagtcctacgaccggtatacccaccctgccctgctgtttggcaccggcacaaaggtgacagtgctgggcggaggaggctccggaggaggaggctctggcggcggcggcagccaggtgcagctggtggagagcggcggcggcgtggtgcagccaggccggtctctgagactgagctgtgccgcctccggcttcacctttagctcctacggcatgcactgggtgcggcaggcccccggcaagggactggagtgggtggccttcatcagatatgacggctccaataagtactatgccgattctgtgaagggcaggtttaccatcagccgggacaacagcaagaatacactgtatctgcagatgaacagcctgagagccgaggacaccgccgtgtactattgtaagacacacggctcccacgataattggggccagggcaccatggtgacagtgtctagcgccgccgagcccaagtcctctgataagacccacacatgcccaccctgtccggcgccagaggcagcaggaggaccaagcgtgttcctgtttccacccaagcccaaagacaccctgatgattagccgaacccctgaagtcacatgcgtggtcgtgtccgtgtctcacgaggacccagaagtcaagttcaactggtacgtggatggcgtcgaggtgcataatgccaagacaaaaccccgggaggaacagtacaacagcacctatagagtcgtgtccgtcctgacagtgctgcaccaggattggctgaacggcaaggaatataagtgcaaagtgtccaataaggccctgcccgctcctatcgagaaaaccatttctaaggcaaaaggccagcctcgcgaaccacaggtctacgtgctgcctccatcccgggacgagctgacaaagaaccaggtctctctgctgtgcctggtgaaaggcttctatccatcagatattgctgtggagtgggaaagcaatgggcagcccgagaacaattacctgacttggccccctgtgctggactctgatgggagtttctttctgtattctaagctgaccgtggataaaagtaggtggcagcagggaaatgtctttagttgttcagtgatgcatgaagccctgcataaccactacacccagaaaagcctgtccctgtcccccgga

SEQ ID NO: 119 - DNA, 1686 bp, Artificial Sequence
  CL_ 18953 Full nt
gagccaaagagctccgacaagacccacacatgccccccttgtccggcgccagaggcagcaggaggaccaagcgtgttcctgtttccacccaagcccaaagacaccctgatgattagccgaacccctgaagtcacatgcgtggtcgtgtccgtgtctcacgaggacccagaagtcaagttcaactggtacgtggatggcgtcgaggtgcataatgccaagacaaaaccccgggaggaacagtacaacagcacctatagagtcgtgtccgtcctgacagtgctgcaccaggattggctgaacggcaaggaatataagtgcaaagtgtccaataaggccctgcccgctcctatcgagaaaaccatttctaaggcaaaaggccagcctcgcgagcctcaggtgtacgtgctgccaccttcccgcgacgagctgaccaagaatcaggtgtctctgctgtgcctggtgaagggcttctatccaagcgatatcgcagtggagtgggagtccaacggacagcccgagaacaattacctgacctggccacccgtgctggacagcgatggctccttctttctgtattccaagctgacagtggacaagtctagatggcagcagggcaacgtgttcagctgttccgtgatgcacgaggccctgcacaaccactacacccagaagtctctgagcttaagcccaggaggaggaggaggctctctgagcggcaggagcgataatcatggaggaggaggcagcggaggaggaggctccggaggcggcggctctggcggcggcggcagcaagatcgacgcctgcaagcgcggcgatgtgacagtgaagcctagccacgtgatcctgctgggctccaccgtgaatatcacatgctctctgaagccacggcagggctgtttccactactcccggagaaacaagctgatcctgtataagttcgacaggcgcatcaactttcaccacggccactctctgaatagccaggtgaccggactgccactgggcaccacactgttcgtgtgcaagctggcctgtatcaatagcgatgagatccagatctgtggagccgagatctttgtgggagtggcccccgagcagcctcagaacctgtcctgcatccagaagggagagcagggaaccgtggcatgtacatgggagcggggcagagacacccacctgtacaccgagtatacactgcagctgagcggccccaagaacctgacatggcagaagcagtgcaaggatatctactgtgactatctggatttcggcatcaacctgaccccagagtcccccgagtctaacttcaccgccaaggtgacagccgtgaactctctgggcagctcctctagcctgcccagcaccttcacatttctggacatcgtgcgccctctgcctccatgggatatccggatcaagtttcagaaggcctccgtgtctagatgcacactgtactggagggacgagggcctggtgctgctgaacaggctgcgctatagacccagcaattccagactgtggaacatggtgaatgtgaccaaggccaagggcaggcacgacctgctggatctgaagcctttcacagagtacgagtttcagatctcctctaagctgcacctgtataagggctcttggagcgattggtccgagtctctgagggcacagacccctgaggaggagcca

SEQ ID NO: 120 - DNA, 1656 bp, Artificial Sequence
  CL_ 18954 Full nt
aagatcgacgcctgcaagcggggcgatgtgacagtgaagccatcccacgtgatcctgctgggctctaccgtgaatatcacatgcagcctgaagccacggcagggctgttttcactactcccggagaaacaagctgatcctgtataagttcgacaggcgcatcaactttcaccacggccacagcctgaacagccaggtgaccggactgcccctgggcaccacactgttcgtgtgcaagctggcctgtatcaattctgatgagatccagatctgtggagccgagatctttgtgggcgtggcccctgagcagccacagaacctgagctgcatccagaagggagagcagggaaccgtggcatgtacatgggagcggggcagagacacccacctgtacaccgagtatacactgcagctgagcggccctaagaatctgacatggcagaagcagtgcaaggatatctactgtgactatctggatttcggcatcaacctgacccccgagtctcctgagagcaacttcaccgccaaggtgacagccgtgaacagcctgggcagctcctctagcctgccttccaccttcacatttctggacatcgtgagaccactgcccccttgggatatcaggatcaagttccagaaggcctctgtgagcagatgcacactgtactggagggacgagggcctggtgctgctgaacaggctgcgctatagaccctccaattctcgcctgtggaacatggtgaatgtgaccaaggccaagggcagacacgacctgctggatctgaagcctttcacagagtacgagtttcagatctcctctaagctgcacctgtataagggcagctggtccgattggtctgagagcctgagagcccagaccccagaggaggagccaggaggaggaggctccggcggaggaggctccctgtctggcaggtccgacaaccacggaggaggaggctctgagcccaagagctccgataagacccacacatgcccaccctgtccggcgccagaggcagcaggaggaccaagcgtgttcctgtttccacccaagcccaaagacaccctgatgattagccgaacccctgaagtcacatgcgtggtcgtgtccgtgtctcacgaggacccagaagtcaagttcaactggtacgtggatggcgtcgaggtgcataatgccaagacaaaaccccgggaggaacagtacaacagcacctatagagtcgtgtccgtcctgacagtgctgcaccaggattggctgaacggcaaggaatataagtgcaaagtgtccaataaggccctgcccgctcctatcgagaaaaccatttctaaggcaaaaggccagcctcgcgaaccacaggtctacgtgctgcctccatcccgggacgagctgacaaagaaccaggtctctctgctgtgcctggtgaaaggcttctatccatcagatattgctgtggagtgggaaagcaatgggcagcccgagaacaattacctgacttggccccctgtgctggactctgatgggagtttctttctgtattctaagctgaccgtggataaaagtaggtggcagcagggaaatgtctttagttgttcagtgatgcatgaagccctgcataaccactacacccagaaaagcctgtccctgtcccccgga

SEQ ID NO: 121 - DNA, 1686 bp, Artificial Sequence
  CL_ 18956 Full nt
aagatcgacgcatgcaagaggggcgatgtgacagtgaagccttctcacgtgatcctgctgggcagcaccgtgaacatcacatgctccctgaagcccagacagggctgttttcactactcccggagaaataagctgatcctgtataagttcgataggcgcatcaactttcaccacggccactctctgaatagccaggtgaccggactgcctctgggcaccacactgttcgtgtgcaagctggcctgtatcaactctgacgagatccagatctgtggagccgagatctttgtgggcgtggccccaggaggaggaggcagcggaggaggcggcagcctgagcggcagaagcgataaccatggaggaggaggcagcagaaatctgccagtggccacaccagaccccggaatgttcccttgcctgcaccactcccagaacctgctgagggccgtgtctaatatgctgcagaaggcccgccagaccctggagttttacccatgtacaagcgaggagatcgaccacgaggatatcaccaaggataagacctccacagtggaggcatgcctgccactggagctgacaaagaacgagtcctgtctgaacagccgggagaccagcttcatcacaaacggctcctgcctggcctctagaaagaccagctttatgatggccctgtgcctgagctccatctacgaggacctgaagatgtatcaggtggagttcaagacaatgaacgccaagctgctgatggaccccaagcggcagatctttctggatcagaatatgctggccgtgatcgacgagctgatgcaggccctgaacttcaatagcgagaccgtgcctcagaagtctagcctggaggagccagatttctacaagacaaagatcaagctgtgcatcctgctgcacgcctttcggatcagagccgtgaccatcgacagagtgatgtcctacctgaacgccagcggcggcggcggcagcggcggaggcggctccgagcctaagtcctctgataagacccacacatgccccccttgtccggcgccagaggctgcaggaggaccaagcgtgttcctgtttccacccaagcctaaagacacactgatgatttcccgaacccccgaagtcacatgcgtggtcgtgtctgtgagtcacgaggaccctgaagtcaagttcaactggtacgtggatggcgtcgaggtgcataatgccaagactaaacctagggaggaacagtacaactcaacctatcgcgtcgtgagcgtcctgacagtgctgcaccaggattggctgaacggcaaagaatataagtgcaaagtgagcaataaggccctgcccgctcctatcgagaaaaccatttccaaggctaaagggcagcctcgcgaaccacaggtctacgtgtatcctccaagccgggacgagctgacaaagaaccaggtctccctgacttgtctggtgaaagggttttaccctagtgatatcgctgtggagtgggaatcaaatggacagccagagaacaattataagactaccccccctgtgctggacagtgatgggtcattcgcactggtctccaagctgacagtggacaaatctcggtggcagcagggaaatgtcttttcatgtagcgtgatgcatgaagcactgcacaaccattacacccagaagtcactgtcactgtcaccagga

SEQ ID NO: 122 - DNA, 2637 bp, Artificial Sequence
  CL_ 18957 Full nt
gagccaaagagctccgacaagacccacacatgccccccttgtccggcgccagaggctgcaggaggaccaagcgtgttcctgtttccacccaagcctaaagacacactgatgatttcccgaacccccgaagtcacatgcgtggtcgtgtctgtgagtcacgaggaccctgaagtcaagttcaactggtacgtggatggcgtcgaggtgcataatgccaagactaaacctagggaggaacagtacaactcaacctatcgcgtcgtgagcgtcctgacagtgctgcaccaggattggctgaacggcaaagaatataagtgcaaagtgagcaataaggccctgcccgctcctatcgagaaaaccatttccaaggctaaagggcagcctcgcgaacctcaggtgtacgtgtatccaccctcccgcgatgagctgacaaagaaccaggtgtctctgacctgtctggtgaagggcttttaccctagcgacatcgccgtggagtgggagtccaatggccagccagagaacaattataagaccacacctccagtgctggactctgatggcagcttcgccctggtgtctaagctgacagtggacaagagcagatggcagcagggcaacgtgttttcttgtagcgtgatgcacgaggccctgcacaatcactacacccagaagtccctgagcttaagccccggagggtctgctgatgggggcatttgggaactgaagaaagatgtctatgtcgtggagctggactggtatcctgacgcacctggggagatggtggtgctgacctgcgacacacctgaggaggatggcatcacctggacactggatcagagctccgaggtgctgggcagcggcaagaccctgacaatccaggtgaaggagttcggcgacgccggacagtacacctgtcacaagggaggagaggtgctgagccactccctgctgctgctgcacaagaaggaggacggcatctggtctacagacatcctgaaggatcagaaggagcccaagaacaagaccttcctgcggtgcgaggccaagaattatagcggcagattcacctgttggtggctgaccacaatctctaccgacctgaccttcagcgtgaagtctagcaggggctcctctgaccctcagggagtgacatgcggagccgccaccctgagcgccgagcgggtgagaggcgataacaaggagtacgagtatagcgtggagtgccaggaggactccgcctgtcccgccgccgaggagtccctgcctatcgaagtgatggtggatgccgtgcacaagctgaagtacgagaattatacaagctccttctttatccgggacatcatcaagcctgatccccctaagaacctgcagctgaagcccctgaagaacagcagacaggtggaggtgtcttgggagtaccctgacacctggtccacaccacacagctatttctccctgaccttttgcgtgcaggtgcagggcaagtccaagagggagaagaaggaccgcgtgttcaccgataagacatctgccaccgtgatctgtcggaagaacgcctctatcagcgtgcgggcccaggatagatactattctagctcctggtccgagtgggcctctgtgccatgcagtggaggaggaggctccggaggaggaggctctggaggaggaggcagcagaaatctgccagtggccaccccagaccccggaatgttcccttgcctgcaccactctcagaacctgctgagggccgtgagcaatatgctgcagaaggcccgccagacactggagttttacccttgtaccagcgaggagatcgaccacgaggatatcacaaaggataagacctccacagtggaggcctgcctgccactggagctgaccaagaacgagtcctgtctgaacagccgggagacaagcttcatcaccaacggctcctgcctggcctctagaaagacaagctttatgatggccctgtgcctgagcagcatctacgaggacctgaagatgtatcaggtggagttcaagaccatgaacgccaagctgctgatggaccccaagcggcagatctttctggatcagaatatgctggccgtgatcgacgagctgatgcaggccctgaacttcaatagcgagacagtgccacagaagtcctctctggaggagcccgatttctacaagaccaagatcaagctgtgcatcctgctgcacgccttccggatcagagccgtgacaatcgatagagtgatgtcctatctgaacgcctctggaggaggaggctccctgtctggccgcagcgacaatcatggaggaggaggcagcggcggcggaggctccaagatcgacgcctgtaagaggggcgatgtgaccgtgaagccatctcacgtgatcctgctgggcagcacagtgaacatcacctgctccctgaagcccagacagggctgtttccactactcccggagaaataagctgatcctgtataagttcgacaggcgcatcaactttcaccacggccactctctgaatagccaggtgaccggcctgcccctgggcaccacactgttcgtgtgcaagctggcctgtatcaatagtgacgagattcagatttgtggggcagagatttttgtgggggtcgctccc

SEQ ID NO: 123 - DNA, 1740 bp, Artificial Sequence
  CL_ 21415 Full nt
atctgggagctgaagaaggacgtgtacgtggtggagctggactggtaccctgatgccccaggcgagatggtggtgctgacctgcgacacacccgaggaggatggcatcacctggacactggaccagagctccgaggtgctgggcagcggcaagaccctgacaatccaggtgaaggagttcggcgatgccggacagtacacctgtcacaagggaggagaggtgctgagccactccctgctgctgctgcacaagaaggaggatggcatctggtccacagacatcctgaaggatcagaaggagccaaagaacaagaccttcctgcggtgcgaggccaagaattatagcggcagattcacctgttggtggctgaccacaatctccaccgacctgacattttctgtgaagtctagcaggggctcctctgatccccagggagtgacatgcggagccgccaccctgtccgccgagcgggtgagaggcgacaacaaggagtacgagtattctgtggagtgccaggaggatagcgcctgtcccgccgccgaggagagcctgcctatcgaagtgatggtggacgccgtgcacaagctgaagtacgagaattatacaagctccttctttatccgggacatcatcaagccagatccccctaagaacctgcagctgaagcccctgaagaatagcagacaggtggaggtgtcctgggagtaccctgatacctggagcacaccacactcctatttctctctgaccttttgcgtgcaggtgcagggcaagtctaagagggagaagaaggaccgcgtgtttaccgataagacaagcgccaccgtgatctgtaggaagaacgcctctatcagcgtgcgggcacaggaccggtactattctagctcctggagcgagtgggcctccgtgccttgctctggaggaggaggcagcggcggaggaggctccatgagcgggcggagcgccaacgcagggggcggcggctctggcggcggcggcagcggaggcggcggcagccagtccgtgctgacacagccaccatctgtgagcggagcccccggacagagggtgaccatctcctgttctggcagccgctccaacatcggctccaatacagtgaagtggtatcagcagctgccaggaaccgcccctaagctgctgatctactataacgaccagaggccaagcggagtgccagatcgcttctctggcagcaagtccggcacatctgccagcctggccatcaccggactgcaggcagaggacgaggccgattactattgccagtcctacgatcggtatacacaccctgccctgctgtttggcaccggcacaaaggtgaccgtgctgggcggaggaggctccggaggaggaggctctggaggaggcggcagccaggtgcagctggtggagagcggcggcggcgtggtgcagcccggcaggagcctgcgcctgtcctgtgcagcctctggcttcaccttttctagctacggcatgcactgggtgcggcaggcccctggcaagggactggagtgggtggccttcatcagatatgacggctccaataagtactatgccgattctgtgaagggccggtttacaatcagcagagataactccaagaataccctgtacctgcagatgaactccctgagagccgaggacacagccgtgtactattgtaagacccacggctctcacgataattggggccagggcacaatggtgaccgtgtcctct

SEQ ID NO: 124 - DNA, 2106 bp, Artificial Sequence
  CL_ 21416 Full nt
gagccaaagagctccgacaagacccacacatgccccccttgtccggcgccagaggctgcaggaggaccaagcgtgttcctgtttccacccaagcctaaagacacactgatgatttcccgaacccccgaagtcacatgcgtggtcgtgtctgtgagtcacgaggaccctgaagtcaagttcaactggtacgtggatggcgtcgaggtgcataatgccaagactaaacctagggaggaacagtacaactcaacctatcgcgtcgtgagcgtcctgacagtgctgcaccaggattggctgaacggcaaagaatataagtgcaaagtgagcaataaggccctgcccgctcctatcgagaaaaccatttccaaggctaaagggcagcctcgcgaacctcaggtgtacgtgtatccaccctcccgcgatgagctgacaaagaaccaggtgtctctgacctgtctggtgaagggcttttaccctagcgacatcgccgtggagtgggagtccaatggccagccagagaacaattataagaccacacctccagtgctggactctgatggcagcttcgccctggtgtctaagctgacagtggacaagagcagatggcagcagggcaacgtgttttcttgtagcgtgatgcacgaggccctgcacaatcactacacccagaagtccctgagcttaagcccaggccggaacctgcccgtggccaccccagatcccggcatgttcccctgcctgcaccactctcagaacctgctgagggccgtgagcaatatgctgcagaaggcccgccagaccctggagttttacccctgtacatccgaggagatcgaccacgaggatatcaccaaggacaagacctctacagtggaggcctgcctgcctctggagctgacaaagaacgagtcttgtctgaatagccgggagacctccttcatcacaaatggctcttgcctggccagcagaaagacctcctttatgatggccctgtgcctgagctccatctacgaggatctgaagatgtatcaggtggagttcaagacaatgaacgccaagctgctgatggaccctaagcggcagatctttctggatcagaatatgctggccgtgatcgacgagctgatgcaggccctgaacttcaatagcgagaccgtgcctcagaagtctagcctggaggagccagatttctacaagacaaagatcaagctgtgcatcctgctgcacgcctttcggatcagagccgtgaccatcgacagagtgatgtcctatctgaacgcctctggaggaggaggcagcggaggaggcggctctatgagcgggcggagcgccaacgcagggggaggaggctccggcggaggaggctctggcggcggcggctcccagtctgtgctgacccagccacctagcgtgtccggagcccccggccagcgggtgacaatctcttgtagcggctccagatctaacatcggcagcaataccgtgaagtggtatcagcagctgcctggcacagccccaaagctgctgatctactataacgatcagaggccctccggcgtgcctgaccgcttcagcggctccaagtctggcaccagcgcctccctggccatcacaggcctgcaggcagaggacgaggcagattactattgccagagctacgataggtatacccacccagccctgctgtttggcaccggcacaaaggtgacagtgctgggcggcggcggcagcggaggaggaggctccggaggcggcggctctcaggtgcagctggtggagtccggaggaggagtggtgcagccaggcaggtctctgcgcctgagctgtgcagcctccggcttcaccttttcctcttacggcatgcactgggtgaggcaggcccccggcaagggactggagtgggtggccttcatccgctatgatggcagcaataagtactatgccgactccgtgaagggccggtttaccatctctagagacaacagcaagaatacactgtatctgcagatgaacagcctgcgcgccgaggataccgccgtgtactattgcaagacacacggctcccacgacaattggggccagggcaccatggtgacagtgagctcc

SEQ ID NO: 125 - DNA, 1500 bp, Artificial Sequence
  CL_ 21417 Full nt
gagccaaagagctccgacaagacccacacatgccccccttgtccggcgccagaggcagcaggaggaccaagcgtgttcctgtttccacccaagcccaaagacaccctgatgattagccgaacccctgaagtcacatgcgtggtcgtgtccgtgtctcacgaggacccagaagtcaagttcaactggtacgtggatggcgtcgaggtgcataatgccaagacaaaaccccgggaggaacagtacaacagcacctatagagtcgtgtccgtcctgacagtgctgcaccaggattggctgaacggcaaggaatataagtgcaaagtgtccaataaggccctgcccgctcctatcgagaaaaccatttctaaggcaaaaggccagcctcgcgagcctcaggtgtacgtgctgccaccttcccgcgacgagctgaccaagaatcaggtgtctctgctgtgcctggtgaagggcttctatccaagcgatatcgcagtggagtgggagtccaacggacagcccgagaacaattacctgacctggccacccgtgctggacagcgatggctccttctttctgtattccaagctgacagtggacaagtctagatggcagcagggcaacgtgttcagctgttccgtgatgcacgaggccctgcacaaccactacacccagaagtctctgagcttaagcccaggaggaggaggaggcagcggcggaggaggctccatgagcgggcggagcgccaacgcagggggcggcggcagcggaggcggcggcagccagtccgtgctgacccagccaccttctgtgagcggagcccccggacagagggtgacaatctcctgctctggcagccgctccaacatcggctccaataccgtgaagtggtatcagcagctgccaggcacagcccccaagctgctgatctactataatgaccagcggcctagcggcgtgccagatagattctctggcagcaagtccggcacctctgccagcctggccatcacaggcctgcaggcagaggacgaggcagattactattgccagtcctacgaccgctatacccaccctgccctgctgtttggcaccggcacaaaggtgacagtgctgggcggcggcggcagcggcgggggaggctccggcggcggcggctctcaggtgcagctggtggagagcggaggaggagtggtgcagcccggcagaagcctgcggctgagctgtgcagccagcggcttcacctttagctcctacggcatgcactgggtgcggcaggcccctggcaagggactggagtgggtggccttcatcagatatgacggcagcaacaagtactatgccgattccgtgaagggcaggtttaccatctcccgcgataactctaagaatacactgtatctgcagatgaactccctgcgggcagaggacaccgccgtgtactattgtaagacacacggctctcacgataattggggccagggcaccatggtgacagtgtctagc

SEQ ID NO: 126 - DNA, 2463 bp, Artificial Sequence
  CL_ 21418 Full nt
caggtgcagctggtggagagcggcggcggcgtggtgcagcctggcaggtctctgcgcctgagctgcgcagcctccggcttcacctttagctcctacggcatgcactgggtgcggcaggcccctggcaagggactggagtgggtggccttcatcagatatgacggctccaacaagtactatgccgattctgtgaagggcaggtttacaatcagccgggacaacagcaagaataccctgtacctgcagatgaactccctgagggccgaggacacagccgtgtactattgcaagacccacggctctcacgataattggggccagggcaccatggtgacagtgtcttccggaggaggaggctccggaggaggaggctctggcggcggcggctctcagagcgtgctgacacagccaccttccgtgtctggagcccccggacagcgggtgaccatcagctgttccggctctagaagcaacatcggcagcaatacagtgaagtggtatcagcagctgccaggaaccgcccccaagctgctgatctactataacgaccagaggccttccggcgtgccagatcgcttctccggctctaagagcggcacatccgcctctctggccatcaccggactgcaggcagaggacgaggcagattactattgtcagagctacgacaggtatacacaccctgccctgctgtttggcaccggcacaaaggtgaccgtgctgggcggaggaggcagcggcggcggaggctccggaggcggcggcagcatgagcgggcggagcgccaacgcagggggcggcggctctggaggaggaggcagcatctgggagctgaagaaggacgtgtacgtggtggagctggactggtaccctgatgcccctggcgagatggtggtgctgacctgcgacacaccagaggaggatggcatcacctggacactggaccagtcctctgaggtgctgggcagcggcaagaccctgacaatccaggtgaaggagttcggcgatgccggacagtacacctgtcacaagggcggcgaggtgctgtctcacagcctgctgctgctgcacaagaaggaggacggcatctggagcacagacatcctgaaggatcagaaggagccaaagaacaagaccttcctgaggtgcgaggccaagaattatagcggcagattcacctgttggtggctgaccacaatcagcaccgacctgacattttccgtgaagagctcccggggctctagcgatccccagggagtgacatgcggagccgccaccctgagcgccgagcgggtgagaggcgacaacaaggagtacgagtatagcgtggagtgccaggaggattccgcctgtccagccgccgaggagtccctgccaatcgaagtgatggtggacgccgtgcacaagctgaagtacgagaattatacctcctctttctttatccgggacatcatcaagcctgatccacccaagaacctgcagctgaagcccctgaagaacagcagacaggtggaggtgagctgggagtaccccgatacctggtccacacctcacagctatttctccctgaccttttgcgtgcaggtgcagggcaagtctaagcgggagaagaaggacagagtgtttaccgataagacaagcgccaccgtgatctgtagaaagaacgccagcatctctgtgcgggcacaggaccggtactatagctcctcttggtccgagtgggcctctgtgccctgcagtggcggcggcggctccggcggaggaggctctgagcctaagagctccgataagacccacacatgccctccatgtccggcgccagaggctgcaggaggaccaagcgtgttcctgtttccacccaagcctaaagacacactgatgatttcccgaacccccgaagtcacatgcgtggtcgtgtctgtgagtcacgaggaccctgaagtcaagttcaactggtacgtggatggcgtcgaggtgcataatgccaagactaaacctagggaggaacagtacaactcaacctatcgcgtcgtgagcgtcctgacagtgctgcaccaggattggctgaacggcaaagaatataagtgcaaagtgagcaataaggccctgcccgctcctatcgagaaaaccatttccaaggctaaagggcagcctcgcgaaccacaggtctacgtgtatcctccaagccgggacgagctgacaaagaaccaggtctccctgacttgtctggtgaaagggttttaccctagtgatatcgctgtggagtgggaatcaaatggacagccagagaacaattataagactaccccccctgtgctggacagtgatgggtcattcgcactggtctccaagctgacagtggacaaatctcggtggcagcagggaaatgtcttttcatgtagcgtgatgcatgaagcactgcacaaccattacacccagaagtcactgtcactgtcaccagga

SEQ ID NO: 127 - DNA, 1413 bp, Artificial Sequence
  CL_ 21419 Full nt
agaaacctgcccgtggccaccccagatcccggaatgtttccatgcctgcaccactctcagaacctgctgcgggccgtgagcaatatgctgcagaaggccagacagaccctggagttctacccctgtacatccgaggagatcgaccacgaggatatcaccaaggacaagacctctacagtggaggcctgcctgcctctggagctgacaaagaacgagtcttgtctgaatagcagggagacctccttcatcacaaatggctcttgcctggccagccgcaagacctcctttatgatggccctgtgcctgagctccatctacgaggatctgaagatgtatcaggtggagttcaagacaatgaacgccaagctgctgatggaccccaagcggcagatctttctggatcagaatatgctggccgtgatcgacgagctgatgcaggccctgaactttaatagcgagaccgtgcctcagaagtctagcctggaggagccagatttctacaagacaaagatcaagctgtgcatcctgctgcacgccttccggatcagagccgtgaccatcgacagagtgatgtcctatctgaacgcctctggaggaggaggcagcggaggaggcggctctatgagcgggcggagcgccaacgcagggggaggaggctccggcggaggaggctctggcggcggcggctcccagtctgtgctgacccagccacctagcgtgtccggagcccccggccagagggtgacaatctcttgtagcggctcccgctctaacatcggcagcaataccgtgaagtggtatcagcagctgcctggcacagccccaaagctgctgatctactataacgatcagagaccctccggcgtgcctgacagattcagcggctccaagtctggcaccagcgcctccctggccatcacaggcctgcaggcagaggacgaggcagattactattgccagagctacgatcggtatacccaccctgccctgctgttcggcaccggcacaaaggtgacagtgctgggcggcggcggcagcggaggaggaggctccggaggcggcggctctcaggtgcagctggtggagtccggaggaggagtggtgcagccaggccggtctctgagactgagctgtgccgcctccggcttcaccttttcctcttacggcatgcactgggtgcggcaggcccccggcaagggactggagtgggtggccttcatcagatatgatggcagcaataagtactatgccgactccgtgaagggcaggtttaccatcagccgggacaacagcaagaatacactgtatctgcagatgaacagcctgagagccgaggataccgccgtgtactattgcaagacacacggctcccacgacaattggggccagggcaccatggtgacagtgagctcc

SEQ ID NO: 128 - DNA, 2463 bp, Artificial Sequence
  CL_ 21421 Full nt
gagccaaagagctccgacaagacccacacatgcccaccttgtccggcgccagaggccgccggaggacctagcgtgttcctgtttccacccaagccaaaggataccctgatgatcagcaggaccccagaggtgacatgcgtggtggtgtctgtgagccacgaggaccccgaggtgaagtttaactggtacgtggatggcgtggaggtgcacaatgccaagacaaagccacgggaggagcagtacaactccacctatagagtggtgtctgtgctgacagtgctgcaccaggactggctgaacggcaaggagtataagtgcaaggtgagcaataaggccctgcctgccccaatcgagaagaccatctccaaggccaagggccagcctcgcgaacctcaggtgtacgtgtatcctccatcccgcgacgagctgaccaagaaccaggtgtctctgacatgtctggtgaagggcttctacccctctgatatcgccgtggagtgggagagcaatggccagcctgagaacaattataagaccacaccccctgtgctggacagcgatggctccttcgccctggtgagcaagctgaccgtggataagtccagatggcagcagggcaacgtgttttcctgttctgtgatgcacgaggccctgcacaatcactacacacagaagagcctgagcttaagcccaggaggaggaggaggctctggaggaggaggcagcatctgggagctgaagaaggacgtgtatgtggtggagctggattggtaccctgatgccccaggcgagatggtggtgctgacctgcgacacacccgaggaggatggcatcacctggacactggaccagagctccgaggtgctgggcagcggcaagaccctgacaatccaggtgaaggagttcggcgatgccggacagtacacctgtcacaagggaggagaggtgctgagccactccctgctgctgctgcacaagaaggaggatggcatctggtccacagacatcctgaaggatcagaaggagccaaagaacaagaccttcctgcggtgcgaggccaagaattatagcggcagattcacctgttggtggctgaccacaatctccaccgacctgacattttctgtgaagtctagcaggggctcctctgatccccagggagtgacatgcggagccgccaccctgtccgccgagcgggtgagaggcgacaacaaggagtacgagtattctgtggagtgccaggaggatagcgcctgtcccgccgccgaggagagcctgcctatcgaagtgatggtggacgccgtgcacaagctgaagtacgagaattatacaagctccttctttatccgggacatcatcaagccagatccccctaagaacctgcagctgaagcccctgaagaatagcagacaggtggaggtgtcctgggagtaccctgatacctggagcacaccacactcctatttctctctgaccttttgcgtgcaggtgcagggcaagtctaagagggagaagaaggaccgcgtgtttaccgataagacaagcgccaccgtgatctgtaggaagaacgcctctatcagcgtgcgggcacaggaccggtactattctagctcctggagcgagtgggcctccgtgccttgctctggaggaggaggcagcggcggaggaggctccatgagcgggcggagcgccaacgcagggggcggcggctctggcggcggcggcagcggaggcggcggcagccagtccgtgctgacacagccaccatctgtgagcggagcccccggacagagggtgaccatctcctgttctggcagccgctccaacatcggctccaatacagtgaagtggtatcagcagctgccaggaaccgcccctaagctgctgatctactataacgaccagaggccaagcggagtgccagatcgcttctctggcagcaagtccggcacatctgccagcctggccatcaccggactgcaggcagaggacgaggccgattactattgccagtcctacgatcggtatacacaccctgccctgctgtttggcaccggcacaaaggtgaccgtgctgggcggaggaggctccggaggaggaggctctggaggaggcggcagccaggtgcagctggtggagagcggcggcggcgtggtgcagcccggcaggagcctgcgcctgtcctgtgcagcctctggcttcaccttttctagctacggcatgcactgggtgcggcaggcccctggcaagggactggagtgggtggccttcatcagatatgacggctccaataagtactatgccgattctgtgaagggccggtttacaatcagcagagataactccaagaataccctgtacctgcagatgaactccctgagagccgaggacacagccgtgtactattgtaagacccacggctctcacgataattggggccagggcacaatggtgaccgtgtcctct

SEQ ID NO: 129 - DNA, 3117 bp, Artificial Sequence
  CL_ 21423 Full nt
gagccaaagagctccgacaagacccacacatgccccccttgtccggcgccagaggctgcaggaggaccaagcgtgttcctgtttccacccaagcctaaagacacactgatgatttcccgaacccccgaagtcacatgcgtggtcgtgtctgtgagtcacgaggaccctgaagtcaagttcaactggtacgtggatggcgtcgaggtgcataatgccaagactaaacctagggaggaacagtacaactcaacctatcgcgtcgtgagcgtcctgacagtgctgcaccaggattggctgaacggcaaagaatataagtgcaaagtgagcaataaggccctgcccgctcctatcgagaaaaccatttccaaggctaaagggcagcctcgcgaacctcaggtgtacgtgtatccaccctcccgcgatgagctgacaaagaaccaggtgtctctgacctgtctggtgaagggcttttaccctagcgacatcgccgtggagtgggagtccaatggccagccagagaacaattataagaccacacctccagtgctggactctgatggcagcttcgccctggtgtctaagctgacagtggacaagagcagatggcagcagggcaacgtgttttcttgtagcgtgatgcacgaggccctgcacaatcactacacccagaagtccctgagcttaagcccaggaggctccgccgatggaggaatctgggagctgaagaaggacgtgtacgtggtggagctggactggtaccctgatgcccctggcgagatggtggtgctgacctgcgacacacccgaggaggatggcatcacctggacactggatcagagctccgaggtgctgggcagcggcaagaccctgacaatccaggtgaaggagttcggcgacgccggacagtacacctgtcacaagggcggcgaggtgctgtcccactctctgctgctgctgcacaagaaggaggacggcatctggtctacagacatcctgaaggatcagaaggagcctaagaacaagaccttcctgaggtgcgaggccaagaattatagcggcagattcacctgttggtggctgaccacaatctccaccgatctgacattttctgtgaagtctagccggggctcctctgacccacagggagtgacatgcggagccgccaccctgtccgccgagcgggtgagaggcgataacaaggagtacgagtattctgtggagtgccaggaggacagcgcctgtccagccgccgaggagagcctgccaatcgaagtgatggtggatgccgtgcacaagctgaagtacgagaattatacaagctccttctttatccgggacatcatcaagcccgatccccctaagaacctgcagctgaagcctctgaagaatagcagacaggtggaggtgtcctgggagtaccccgacacctggagcacacctcactcttatttcagcctgaccttttgcgtgcaggtgcagggcaagtctaagcgggagaagaaggacagagtgttcaccgataagacaagcgccaccgtgatctgtcggaagaacgccagcatctccgtgagggcacaggaccggtactattctagctcctggtccgagtgggcctctgtgccctgtagcggaggaggaggcagcggaggaggaggctccggaggcggcggctctagaaatctgccagtggccacccctgacccaggcatgttcccctgcctgcaccacagccagaacctgctgagggccgtgtccaatatgctgcagaaggcccgccagacactggagttttacccttgtacctccgaggagatcgaccacgaggatatcacaaaggataagacctctacagtggaggcctgcctgccactggagctgaccaagaacgagtcctgtctgaacagccgggagaccagcttcatcaccaacggctcctgcctggcctctagaaagacaagctttatgatggccctgtgcctgagcagcatctacgaggacctgaagatgtatcaggtggagttcaagaccatgaacgccaagctgctgatggaccccaagcggcagatctttctggatcagaatatgctggccgtgatcgacgagctgatgcaggccctgaacttcaattccgagacagtgcctcagaagtcctctctggaggagccagatttctacaagaccaagatcaagctgtgcatcctgctgcacgccttccggatcagagccgtgaccatcgacagagtgatgagctatctgaacgcctccggaggaggaggctctggaggaggcggcagcggcggcggcggctctatgagcgggcggagcgccaacgcagggggaggaggctccggcgggggaggctctggcggcggaggcagcggaggaggcggctcccagtctgtgctgacacagccaccaagcgtgtccggagcccccggacagagggtgaccatctcttgtagcggctccagatctaacatcggctccaatacagtgaagtggtatcagcagctgccaggaaccgcccccaagctgctgatctactataacgatcagcggcctagcggcgtgccagacagattcagcggctccaagtctggcacaagcgcctccctggccatcaccggactgcaggccgaggacgaggccgattactattgccagtcctacgataggtatacacaccctgccctgctgtttggcaccggcacaaaggtgaccgtgctgggcggaggaggctccggcggaggcggctctggcggcggcggcagccaggtgcagctggtggagagcggcggcggcgtggtgcagcccggcagaagcctgcggctgagctgtgcagccagcggcttcacctttagctcctacggcatgcactgggtgaggcaggcccctggcaagggactggagtgggtggccttcatccgctatgatggctccaataagtactatgccgactctgtgaagggcaggtttacaatctcccgcgacaactctaagaataccctgtacctgcagatgaacagcctgcgcgccgaggatacagccgtgtactattgcaagacccacggctcccacgacaattggggccagggcacaatggtgaccgtgtctagc

SEQ ID NO: 130 - DNA, 1725 bp, Artificial Sequence
  CL_ 21446 Full nt
caggtgcagctggtggagagcggcggcggcgtggtgcagcccggcaggagcctgcgcctgtcctgcgcagcctctggcttcacctttagctcctacggcatgcactgggtgcggcaggccccaggcaagggactggagtgggtggccttcatcagatatgacggctccaacaagtactatgccgattctgtgaagggcaggtttacaatcagccgcgacaactccaagaataccctgtacctgcagatgaacagcctgagggccgaggacacagccgtgtactattgcaagacccacggctcccacgataattggggccagggcaccatggtgacagtgtctagtggaggaggaggctctggaggaggaggcagcggaggaggaggcagccagtccgtgctgacacagcccccttctgtgagcggagcccccggacagagggtgaccatctcctgttctggcagcagatccaacatcggcagcaatacagtgaagtggtatcagcagctgccaggaaccgcccctaagctgctgatctactataacgaccagaggccatccggagtgccagatcgcttctctggcagcaagtccggcacatctgccagcctggccatcaccggactgcaggcagaggacgaggccgattactattgtcagagctacgacaggtatacacaccccgccctgctgtttggcaccggcacaaaggtgaccgtgctgggcggcggcggctctggcggcggcggctccatgagcgggcggagcgccaacgcagggggaggaggctccggaggaggaggctctatctgggagctgaagaaggacgtgtacgtggtggagctggactggtaccctgatgccccaggcgagatggtggtgctgacctgcgacacacctgaggaggatggcatcacctggacactggaccagtcctctgaggtgctgggctccggcaagaccctgacaatccaggtgaaggagttcggcgatgccggacagtacacctgtcacaagggaggagaggtgctgagccactccctgctgctgctgcacaagaaggaggacggcatctggtctacagacatcctgaaggatcagaaggagcctaagaacaagaccttcctgaggtgcgaggccaagaattatagcggcagattcacctgttggtggctgaccacaatcagcaccgacctgacattttccgtgaagagctcccggggctctagcgatccacagggagtgacatgcggagccgccaccctgagcgccgagcgggtgagaggcgacaacaaggagtacgagtatagcgtggagtgccaggaggattccgcctgtcccgccgccgaggagtccctgcctatcgaagtgatggtggacgccgtgcacaagctgaagtacgagaattatacctcctctttctttatccgggacatcatcaagccagatccacccaagaacctgcagctgaagcccctgaagaacagcagacaggtggaggtgagctgggagtaccctgatacctggagcacaccacactcctatttctctctgaccttttgcgtgcaggtgcagggcaagtccaagcgggagaagaaggacagagtgtttaccgataagacatctgccaccgtgatctgtagaaagaacgccagcatcagcgtgcgggcacaggaccggtactatagctcctcttggtctgagtgggccagcgtgccttgttcc

SEQ ID NO: 131 - DNA, 1443 bp, Artificial Sequence
  CL_ 21447 Full nt
caggtgcagctggtggagagcggaggaggagtggtgcagccaggcaggtctctgcgcctgagctgcgcagcctccggcttcacctttagctcctacggcatgcactgggtgcggcaggcccctggcaagggactggagtgggtggccttcatcagatatgacggctctaacaagtactatgccgatagcgtgaagggccggtttaccatctctagagataacagcaagaatacactgtacctgcagatgaactctctgagggccgaggataccgccgtgtactattgcaagacacacggctcccacgacaattggggccagggcaccatggtgacagtgtctagcggaggaggaggctccggaggaggaggctctggcggcggcggctctcagagcgtgctgacccagccaccttccgtgtctggagcccccggacagagggtgacaatcagctgttccggctctagaagcaacatcggcagcaataccgtgaagtggtatcagcagctgcctggcacagccccaaagctgctgatctactataatgaccagaggccctccggcgtgcctgatcgcttctccggctctaagagcggcacctccgcctctctggccatcacaggcctgcaggcagaggacgaggcagattactattgtcagagctacgacagatacacccaccccgccctgctgtttggcaccggcacaaaggtgacagtgctgggcggaggaggcagcggcggcggaggctccggaggcggcggctctggaggaggcggcagcatgagcgggcggagcgccaacgcagggggcggcggcagcggcggcggcggctccggaggagggggctctcgcaatctgcctgtggccaccccagatcccggcatgttcccatgcctgcaccactcccagaacctgctgagggccgtgtctaatatgctgcagaaggcccgccagaccctggagttttacccctgtacaagcgaggagatcgaccacgaggatatcaccaaggacaagacctccacagtggaggcctgcctgcctctggagctgacaaagaacgagtcctgtctgaacagccgggagaccagcttcatcacaaacggctcctgcctggcctctcgcaagaccagctttatgatggccctgtgcctgagctctatctacgaggatctgaagatgtatcaggtggagttcaagacaatgaacgccaagctgctgatggaccccaagcggcagatctttctggatcagaatatgctggccgtgatcgacgagctgatgcaggccctgaactttaatagcgagaccgtgccacagaagagctccctggaggagcccgatttctacaagacaaagatcaagctgtgcatcctgctgcacgcctttcggatcagagccgtgaccatcgacagagtgatgagctacctgaacgccagc

SEQ ID NO: 132 - DNA, 1545 bp, Artificial Sequence
  CL_ 21451 Full nt
caggtgcagctggtggagagcggcggcggcgtggtgcagcctggccggagcctgagactgtcctgcgcagcctctggcttcacctttagctcctacggcatgcactgggtgcggcaggcccctggcaagggactggagtgggtggccttcatcagatatgacggctccaacaagtactatgccgattctgtgaagggcaggtttaccatcagccgcgacaactccaagaatacactgtacctgcagatgaacagcctgcgggcagaggacaccgccgtgtactattgcaagacacacggctcccacgataattggggccagggcaccatggtgacagtgtcttccggaggaggaggctctggaggaggaggcagcggaggaggaggcagccagtccgtgctgacccagccaccttctgtgagcggagcccccggacagagggtgacaatctcctgttctggcagccgctccaacatcggctctaataccgtgaagtggtatcagcagctgcctggcacagccccaaagctgctgatctactataacgaccagagaccctccggcgtgcctgatagattctctggcagcaagtccggcacctctgccagcctggccatcacaggcctgcaggcagaggacgaggcagattactattgtcagagctacgacagatacacccacccagccctgctgtttggcaccggcacaaaggtgacagtgctgggcggaggaggctccggcggcggaggctctggcggcggcggcagcggaggcggcggctccatgagcgggcggagcgccaacgcagggggcggcggctccggcggcggcggctctggaggaggcggcagcgagcccaagtcctctgataagacccacacatgcccaccctgtccggcgccagaggcagcaggaggaccaagcgtgttcctgtttccacccaagcccaaagacaccctgatgattagccgaacccctgaagtcacatgcgtggtcgtgtccgtgtctcacgaggacccagaagtcaagttcaactggtacgtggatggcgtcgaggtgcataatgccaagacaaaaccccgggaggaacagtacaacagcacctatagagtcgtgtccgtcctgacagtgctgcaccaggattggctgaacggcaaggaatataagtgcaaagtgtccaataaggccctgcccgctcctatcgagaaaaccatttctaaggcaaaaggccagcctcgcgaaccacaggtctacgtgctgcctccatcccgggacgagctgacaaagaaccaggtctctctgctgtgcctggtgaaaggcttctatccatcagatattgctgtggagtgggaaagcaatgggcagcccgagaacaattacctgacttggccccctgtgctggactctgatgggagtttctttctgtattctaagctgaccgtggataaaagtaggtggcagcagggaaatgtctttagttgttcagtgatgcatgaagccctgcataaccactacacccagaaaagcctgtccctgtcccccgga

SEQ ID NO: 133 - DNA, 2166 bp, Artificial Sequence
  CL_ 21452 Full nt
caggtgcagctggtggagagcggaggaggagtggtgcagcctggcaggtccctgcgcctgtcttgcgcagccagcggcttcacctttagctcctacggcatgcactgggtgcggcaggcccccggcaagggactggagtgggtggccttcatcagatatgacggcagcaacaagtactatgccgattccgtgaagggccggtttaccatctccagagataactctaagaatacactgtacctgcagatgaacagcctgagggccgaggataccgccgtgtactattgcaagacacacggctcccacgacaattggggccagggcaccatggtgacagtgtcttccggaggaggaggcagcggaggaggaggctccggaggcggcggctcccagtctgtgctgacccagccacctagcgtgtccggagcccccggccagcgggtgacaatctcttgtagcggctccagatctaacatcggcagcaataccgtgaagtggtatcagcagctgcccggcacagcccctaagctgctgatctactataatgaccagaggccatccggcgtgcccgatcgcttcagcggctccaagtctggcaccagcgcctccctggccatcacaggcctgcaggcagaggacgaggcagattactattgtcagagctacgacagatacacccaccctgccctgctgtttggcaccggcacaaaggtgacagtgctgggcggaggaggctctggaggaggaggcagcggcggcggcggctctatgagcgggcggagcgccaacgcagggggaggaggctccggaggaggaggctctggcggcggcggcagcggaggagggggctcccgcaatctgcccgtggccacccctgatccaggcatgttcccttgcctgcaccactctcagaacctgctgagggccgtgagcaatatgctgcagaaggcccgccagaccctggagttttacccatgtacatccgaggagatcgaccacgaggatatcaccaaggacaagacctctacagtggaggcctgcctgcccctggagctgacaaagaacgagagctgtctgaacagccgggagaccagcttcatcacaaacggcagctgcctggcctcccgcaagacctcttttatgatggccctgtgcctgagctctatctacgaggatctgaagatgtatcaggtggagttcaagacaatgaacgccaagctgctgatggaccctaagcggcagatctttctggatcagaatatgctggccgtgatcgacgagctgatgcaggccctgaactttaatagcgagaccgtgcctcagaagagctccctggaggagccagatttctacaagacaaagatcaagctgtgcatcctgctgcacgcctttcggatcagagccgtgaccatcgacagagtgatgtcttacctgaacgccagcggcggcggaggctccggaggaggcggctctgagccaaagtctagcgacaagacccacacatgcccaccctgtccggcgccagaggctgcaggaggaccaagcgtgttcctgtttccacccaagcctaaagacacactgatgatttcccgaacccccgaagtcacatgcgtggtcgtgtctgtgagtcacgaggaccctgaagtcaagttcaactggtacgtggatggcgtcgaggtgcataatgccaagactaaacctagggaggaacagtacaactcaacctatcgcgtcgtgagcgtcctgacagtgctgcaccaggattggctgaacggcaaagaatataagtgcaaagtgagcaataaggccctgcccgctcctatcgagaaaaccatttccaaggctaaagggcagcctcgcgaaccacaggtctacgtgtatcctccaagccgggacgagctgacaaagaaccaggtctccctgacttgtctggtgaaagggttttaccctagtgatatcgctgtggagtgggaatcaaatggacagccagagaacaattataagactaccccccctgtgctggacagtgatgggtcattcgcactggtctccaagctgacagtggacaaatctcggtggcagcagggaaatgtcttttcatgtagcgtgatgcatgaagcactgcacaaccattacacccagaagtcactgtcactgtcaccagga

SEQ ID NO: 134 - DNA, 1422 bp, Artificial Sequence
  CL_ 22203 Full nt
caggtgcagctggtggagagcggcggcggcgtggtgcagcctggccggtccctgagactgtcttgcgcagccagcggcttcacctttagctccgctggcatgcactgggtgcggcaggcccctggcaagggactggagtgggtggccttcatcagatatgacggctctaacaagtactatgccgatagcgtgaagggcaggtttaccatctcccgcgacaactctaagaatacactgtacctgcagatgaactccctgcgggcagaggacaccgccgtgtactattgcaagacacacggctctcacgataattggggccagggcaccatggtgacagtgtctagcggaggaggaggcagcggaggaggaggctccggcggcggcggcagccagtccgtgctgacccagccaccttctgtgagcggagcccccggacagagggtgacaatctcctgttctggcagccgctccaacatcggcagcaataccgtgaagtggtatcagcagctgcctggcacagccccaaagctgctgatctactataatgaccagagaccctccggcgtgcctgatagattctctggcagcaagtccggcacctctgccagcctggccatcacaggactgcaggcagaggacgaggcagattactattgtcagtcctacgacagatatacccacccagccctgctgtttggcaccggcacaaaggtgacagtgctggccgccgagcccaagtcctctgataagacccacacatgcccaccctgtccggcgccagaggcagcaggaggaccaagcgtgttcctgtttccacccaagcccaaagacaccctgatgattagccgaacccctgaagtcacatgcgtggtcgtgtccgtgtctcacgaggacccagaagtcaagttcaactggtacgtggatggcgtcgaggtgcataatgccaagacaaaaccccgggaggaacagtacaacagcacctatagagtcgtgtccgtcctgacagtgctgcaccaggattggctgaacggcaaggaatataagtgcaaagtgtccaataaggccctgcccgctcctatcgagaaaaccatttctaaggcaaaaggccagcctcgcgaaccacaggtctacgtgctgcctccatcccgggacgagctgacaaagaaccaggtctctctgctgtgcctggtgaaaggcttctatccatcagatattgctgtggagtgggaaagcaatgggcagcccgagaacaattacctgacttggccccctgtgctggactctgatgggagtttctttctgtattctaagctgaccgtggataaaagtaggtggcagcagggaaatgtctttagttgttcagtgatgcatgaagccctgcataaccactacacccagaaaagcctgtccctgtcccccgga

SEQ ID NO: 135 - DNA, 1422 bp, Artificial Sequence
  CL_ 22206 Full nt
caggtgcagctggtggagagcggcggcggcgtggtgcagcctggccggtccctgagactgtcttgcgcagccagcggcgtgacctttagctcctacggcatgcactgggtgcggcaggcccctggcaagggactggagtgggtggccttcatcagatatgacggctctaacaagtactatgccgatagcgtgaagggcaggtttaccatctcccgcgacaactctaagaatacactgtacctgcagatgaactccctgcgggcagaggacaccgccgtgtactattgcaagacacacggctctcacgataattggggccagggcaccatggtgacagtgtctagcggaggaggaggcagcggaggaggaggctccggcggcggcggcagccagtccgtgctgacccagccaccttctgtgagcggagcccccggacagagggtgacaatctcctgttctggcagccgctccaacatcggcagcaataccgtgaagtggtatcagcagctgcctggcacagccccaaagctgctgatctactataatgaccagagaccctccggcgtgcctgatagattctctggcagcaagtccggcacctctgccagcctggccatcacaggactgcaggcagaggacgaggcagattactattgtcagtcctacgacagatatacccacccagccctgctgtttggcaccggcacaaaggtgacagtgctggccgccgagcccaagtcctctgataagacccacacatgcccaccctgtccggcgccagaggcagcaggaggaccaagcgtgttcctgtttccacccaagcccaaagacaccctgatgattagccgaacccctgaagtcacatgcgtggtcgtgtccgtgtctcacgaggacccagaagtcaagttcaactggtacgtggatggcgtcgaggtgcataatgccaagacaaaaccccgggaggaacagtacaacagcacctatagagtcgtgtccgtcctgacagtgctgcaccaggattggctgaacggcaaggaatataagtgcaaagtgtccaataaggccctgcccgctcctatcgagaaaaccatttctaaggcaaaaggccagcctcgcgaaccacaggtctacgtgctgcctccatcccgggacgagctgacaaagaaccaggtctctctgctgtgcctggtgaaaggcttctatccatcagatattgctgtggagtgggaaagcaatgggcagcccgagaacaattacctgacttggccccctgtgctggactctgatgggagtttctttctgtattctaagctgaccgtggataaaagtaggtggcagcagggaaatgtctttagttgttcagtgatgcatgaagccctgcataaccactacacccagaaaagcctgtccctgtcccccgga

SEQ ID NO: 136 - DNA, 1422 bp, Artificial Sequence
  CL_ 22207 Full nt
caggtgcagctggtggagagcggcggcggcgtggtgcagcctggccggtccctgagactgtcttgcgcagccagcggcttcacctttagctcctacggcatgcactgggtgcggcaggcccctggcaagggactggagtgggtggccttcatcagagtggacggctctaacaagtactatgccgatagcgtgaagggcaggtttaccatctcccgcgacaactctaagaatacactgtacctgcagatgaactccctgcgggcagaggacaccgccgtgtactattgcaagacacacggctctcacgataattggggccagggcaccatggtgacagtgtctagcggaggaggaggcagcggaggaggaggctccggcggcggcggcagccagtccgtgctgacccagccaccttctgtgagcggagcccccggacagagggtgacaatctcctgttctggcagccgctccaacatcggcagcaataccgtgaagtggtatcagcagctgcctggcacagccccaaagctgctgatctactataatgaccagagaccctccggcgtgcctgatagattctctggcagcaagtccggcacctctgccagcctggccatcacaggactgcaggcagaggacgaggcagattactattgtcagtcctacgacagatatacccacccagccctgctgtttggcaccggcacaaaggtgacagtgctggccgccgagcccaagtcctctgataagacccacacatgcccaccctgtccggcgccagaggcagcaggaggaccaagcgtgttcctgtttccacccaagcccaaagacaccctgatgattagccgaacccctgaagtcacatgcgtggtcgtgtccgtgtctcacgaggacccagaagtcaagttcaactggtacgtggatggcgtcgaggtgcataatgccaagacaaaaccccgggaggaacagtacaacagcacctatagagtcgtgtccgtcctgacagtgctgcaccaggattggctgaacggcaaggaatataagtgcaaagtgtccaataaggccctgcccgctcctatcgagaaaaccatttctaaggcaaaaggccagcctcgcgaaccacaggtctacgtgctgcctccatcccgggacgagctgacaaagaaccaggtctctctgctgtgcctggtgaaaggcttctatccatcagatattgctgtggagtgggaaagcaatgggcagcccgagaacaattacctgacttggccccctgtgctggactctgatgggagtttctttctgtattctaagctgaccgtggataaaagtaggtggcagcagggaaatgtctttagttgttcagtgatgcatgaagccctgcataaccactacacccagaaaagcctgtccctgtcccccgga

SEQ ID NO: 137 - DNA, 1422 bp, Artificial Sequence
  CL_ 22208 Full nt
caggtgcagctggtggagagcggcggcggcgtggtgcagcctggccggtccctgagactgtcttgcgcagccagcggcttcacctttagctcctacggcatgcactgggtgcggcaggcccctggcaagggactggagtgggtggccttcatcgagtatgacggctctaacaagtactatgccgatagcgtgaagggcaggtttaccatctcccgcgacaactctaagaatacactgtacctgcagatgaactccctgcgggcagaggacaccgccgtgtactattgcaagacacacggctctcacgataattggggccagggcaccatggtgacagtgtctagcggaggaggaggcagcggaggaggaggctccggcggcggcggcagccagtccgtgctgacccagccaccttctgtgagcggagcccccggacagagggtgacaatctcctgttctggcagccgctccaacatcggcagcaataccgtgaagtggtatcagcagctgcctggcacagccccaaagctgctgatctactataatgaccagagaccctccggcgtgcctgatagattctctggcagcaagtccggcacctctgccagcctggccatcacaggactgcaggcagaggacgaggcagattactattgtcagtcctacgacagatatacccacccagccctgctgtttggcaccggcacaaaggtgacagtgctggccgccgagcccaagtcctctgataagacccacacatgcccaccctgtccggcgccagaggcagcaggaggaccaagcgtgttcctgtttccacccaagcccaaagacaccctgatgattagccgaacccctgaagtcacatgcgtggtcgtgtccgtgtctcacgaggacccagaagtcaagttcaactggtacgtggatggcgtcgaggtgcataatgccaagacaaaaccccgggaggaacagtacaacagcacctatagagtcgtgtccgtcctgacagtgctgcaccaggattggctgaacggcaaggaatataagtgcaaagtgtccaataaggccctgcccgctcctatcgagaaaaccatttctaaggcaaaaggccagcctcgcgaaccacaggtctacgtgctgcctccatcccgggacgagctgacaaagaaccaggtctctctgctgtgcctggtgaaaggcttctatccatcagatattgctgtggagtgggaaagcaatgggcagcccgagaacaattacctgacttggccccctgtgctggactctgatgggagtttctttctgtattctaagctgaccgtggataaaagtaggtggcagcagggaaatgtctttagttgttcagtgatgcatgaagccctgcataaccactacacccagaaaagcctgtccctgtcccccgga

SEQ ID NO: 138 - DNA, 1422 bp, Artificial Sequence
  CL_ 22209 Full nt
caggtgcagctggtggagagcggcggcggcgtggtgcagcctggccggtccctgagactgtcttgcgcagccagcggcttcacctttagctcctacggcatgcactgggtgcggcaggcccctggcaagggactggagtgggtggccttcatcgaggtggacggctctaacaagtactatgccgatagcgtgaagggcaggtttaccatctcccgcgacaactctaagaatacactgtacctgcagatgaactccctgcgggcagaggacaccgccgtgtactattgcaagacacacggctctcacgataattggggccagggcaccatggtgacagtgtctagcggaggaggaggcagcggaggaggaggctccggcggcggcggcagccagtccgtgctgacccagccaccttctgtgagcggagcccccggacagagggtgacaatctcctgttctggcagccgctccaacatcggcagcaataccgtgaagtggtatcagcagctgcctggcacagccccaaagctgctgatctactataatgaccagagaccctccggcgtgcctgatagattctctggcagcaagtccggcacctctgccagcctggccatcacaggactgcaggcagaggacgaggcagattactattgtcagtcctacgacagatatacccacccagccctgctgtttggcaccggcacaaaggtgacagtgctggccgccgagcccaagtcctctgataagacccacacatgcccaccctgtccggcgccagaggcagcaggaggaccaagcgtgttcctgtttccacccaagcccaaagacaccctgatgattagccgaacccctgaagtcacatgcgtggtcgtgtccgtgtctcacgaggacccagaagtcaagttcaactggtacgtggatggcgtcgaggtgcataatgccaagacaaaaccccgggaggaacagtacaacagcacctatagagtcgtgtccgtcctgacagtgctgcaccaggattggctgaacggcaaggaatataagtgcaaagtgtccaataaggccctgcccgctcctatcgagaaaaccatttctaaggcaaaaggccagcctcgcgaaccacaggtctacgtgctgcctccatcccgggacgagctgacaaagaaccaggtctctctgctgtgcctggtgaaaggcttctatccatcagatattgctgtggagtgggaaagcaatgggcagcccgagaacaattacctgacttggccccctgtgctggactctgatgggagtttctttctgtattctaagctgaccgtggataaaagtaggtggcagcagggaaatgtctttagttgttcagtgatgcatgaagccctgcataaccactacacccagaaaagcctgtccctgtcccccgga

SEQ ID NO: 139 - DNA, 1422 bp, Artificial Sequence
  CL_ 22211 Full nt
caggtgcagctggtggagagcggcggcggcgtggtgcagcctggccggtccctgagactgtcttgcgcagccagcggcttcacctttagctcctacggcatgcactgggtgcggcaggcccctggcaagggactggagtgggtggccttcatcagatatgacggctctaacaagtactatgccgatagcgtgaagggcaggtttaccatctcccgcgacaactctaagaatacactgtacctgcagatgaactccctgcgggcagaggacaccgccgtgtactattgcaagacagacggctctcacgataattggggccagggcaccatggtgacagtgtctagcggaggaggaggcagcggaggaggaggctccggcggcggcggcagccagtccgtgctgacccagccaccttctgtgagcggagcccccggacagagggtgacaatctcctgttctggcagccgctccaacatcggcagcaataccgtgaagtggtatcagcagctgcctggcacagccccaaagctgctgatctactataatgaccagagaccctccggcgtgcctgatagattctctggcagcaagtccggcacctctgccagcctggccatcacaggactgcaggcagaggacgaggcagattactattgtcagtcctacgacagatatacccacccagccctgctgtttggcaccggcacaaaggtgacagtgctggccgccgagcccaagtcctctgataagacccacacatgcccaccctgtccggcgccagaggcagcaggaggaccaagcgtgttcctgtttccacccaagcccaaagacaccctgatgattagccgaacccctgaagtcacatgcgtggtcgtgtccgtgtctcacgaggacccagaagtcaagttcaactggtacgtggatggcgtcgaggtgcataatgccaagacaaaaccccgggaggaacagtacaacagcacctatagagtcgtgtccgtcctgacagtgctgcaccaggattggctgaacggcaaggaatataagtgcaaagtgtccaataaggccctgcccgctcctatcgagaaaaccatttctaaggcaaaaggccagcctcgcgaaccacaggtctacgtgctgcctccatcccgggacgagctgacaaagaaccaggtctctctgctgtgcctggtgaaaggcttctatccatcagatattgctgtggagtgggaaagcaatgggcagcccgagaacaattacctgacttggccccctgtgctggactctgatgggagtttctttctgtattctaagctgaccgtggataaaagtaggtggcagcagggaaatgtctttagttgttcagtgatgcatgaagccctgcataaccactacacccagaaaagcctgtccctgtcccccgga

SEQ ID NO: 140 - DNA, 1422 bp, Artificial Sequence
  CL_ 22212 Full nt
caggtgcagctggtggagagcggcggcggcgtggtgcagcctggccggtccctgagactgtcttgcgcagccagcggcttcacctttagctcctacggcatgcactgggtgcggcaggcccctggcaagggactggagtgggtggccttcatcagatatgacggctctaacaagtactatgccgatagcgtgaagggcaggtttaccatctcccgcgacaactctaagaatacactgtacctgcagatgaactccctgcgggcagaggacaccgccgtgtactattgcaagacacacacctctcacgataattggggccagggcaccatggtgacagtgtctagcggaggaggaggcagcggaggaggaggctccggcggcggcggcagccagtccgtgctgacccagccaccttctgtgagcggagcccccggacagagggtgacaatctcctgttctggcagccgctccaacatcggcagcaataccgtgaagtggtatcagcagctgcctggcacagccccaaagctgctgatctactataatgaccagagaccctccggcgtgcctgatagattctctggcagcaagtccggcacctctgccagcctggccatcacaggactgcaggcagaggacgaggcagattactattgtcagtcctacgacagatatacccacccagccctgctgtttggcaccggcacaaaggtgacagtgctggccgccgagcccaagtcctctgataagacccacacatgcccaccctgtccggcgccagaggcagcaggaggaccaagcgtgttcctgtttccacccaagcccaaagacaccctgatgattagccgaacccctgaagtcacatgcgtggtcgtgtccgtgtctcacgaggacccagaagtcaagttcaactggtacgtggatggcgtcgaggtgcataatgccaagacaaaaccccgggaggaacagtacaacagcacctatagagtcgtgtccgtcctgacagtgctgcaccaggattggctgaacggcaaggaatataagtgcaaagtgtccaataaggccctgcccgctcctatcgagaaaaccatttctaaggcaaaaggccagcctcgcgaaccacaggtctacgtgctgcctccatcccgggacgagctgacaaagaaccaggtctctctgctgtgcctggtgaaaggcttctatccatcagatattgctgtggagtgggaaagcaatgggcagcccgagaacaattacctgacttggccccctgtgctggactctgatgggagtttctttctgtattctaagctgaccgtggataaaagtaggtggcagcagggaaatgtctttagttgttcagtgatgcatgaagccctgcataaccactacacccagaaaagcctgtccctgtcccccgga

SEQ ID NO: 141 - DNA, 1422 bp, Artificial Sequence
  CL_ 22214 Full nt
caggtgcagctggtggagagcggcggcggcgtggtgcagcctggccggtccctgagactgtcttgcgcagccagcggcttcacctttagctcctacggcatgcactgggtgcggcaggcccctggcaagggactggagtgggtggccttcatcagatatgacggctctaacaagtactatgccgatagcgtgaagggcaggtttaccatctcccgcgacaactctaagaatacactgtacctgcagatgaactccctgcgggcagaggacaccgccgtgtactattgcaagacacacggctctgccgataattggggccagggcaccatggtgacagtgtctagcggaggaggaggcagcggaggaggaggctccggcggcggcggcagccagtccgtgctgacccagccaccttctgtgagcggagcccccggacagagggtgacaatctcctgttctggcagccgctccaacatcggcagcaataccgtgaagtggtatcagcagctgcctggcacagccccaaagctgctgatctactataatgaccagagaccctccggcgtgcctgatagattctctggcagcaagtccggcacctctgccagcctggccatcacaggactgcaggcagaggacgaggcagattactattgtcagtcctacgacagatatacccacccagccctgctgtttggcaccggcacaaaggtgacagtgctggccgccgagcccaagtcctctgataagacccacacatgcccaccctgtccggcgccagaggcagcaggaggaccaagcgtgttcctgtttccacccaagcccaaagacaccctgatgattagccgaacccctgaagtcacatgcgtggtcgtgtccgtgtctcacgaggacccagaagtcaagttcaactggtacgtggatggcgtcgaggtgcataatgccaagacaaaaccccgggaggaacagtacaacagcacctatagagtcgtgtccgtcctgacagtgctgcaccaggattggctgaacggcaaggaatataagtgcaaagtgtccaataaggccctgcccgctcctatcgagaaaaccatttctaaggcaaaaggccagcctcgcgaaccacaggtctacgtgctgcctccatcccgggacgagctgacaaagaaccaggtctctctgctgtgcctggtgaaaggcttctatccatcagatattgctgtggagtgggaaagcaatgggcagcccgagaacaattacctgacttggccccctgtgctggactctgatgggagtttctttctgtattctaagctgaccgtggataaaagtaggtggcagcagggaaatgtctttagttgttcagtgatgcatgaagccctgcataaccactacacccagaaaagcctgtccctgtcccccgga

SEQ ID NO: 142 - DNA, 2262 bp, Artificial Sequence
  CL_ 22279 Full nt
gagccaaagagctccgacaagacccacacatgccccccttgtccggcgccagaggctgcaggaggaccaagcgtgttcctgtttccacccaagcctaaagacacactgatgatttcccgaacccccgaagtcacatgcgtggtcgtgtctgtgagtcacgaggaccctgaagtcaagttcaactggtacgtggatggcgtcgaggtgcataatgccaagactaaacctagggaggaacagtacaactcaacctatcgcgtcgtgagcgtcctgacagtgctgcaccaggattggctgaacggcaaagaatataagtgcaaagtgagcaataaggccctgcccgctcctatcgagaaaaccatttccaaggctaaagggcagcctcgcgaacctcaggtgtacgtgtatccaccctcccgcgatgagctgacaaagaaccaggtgtctctgacctgtctggtgaagggcttttaccctagcgacatcgccgtggagtgggagtccaatggccagccagagaacaattataagaccacacctccagtgctggactctgatggcagcttcgccctggtgtctaagctgacagtggacaagagcagatggcagcagggcaacgtgttttcttgtagcgtgatgcacgaggccctgcacaatcactacacccagaagtccctgagcttaagccctggaggcagcgccgatggaggaatctgggagctgaagaaggacgtgtacgtggtggagctggactggtatccagatgcaccaggagagatggtggtgctgacctgcgacacaccagaggaggatggcatcacctggacactggatcagagctccgaggtgctgggctccggcaagaccctgacaatccaggtgaaggagttcggcgacgccggacagtacacctgtcacaagggcggcgaggtgctgtcccactctctgctgctgctgcacaagaaggaggacggcatctggagcacagacatcctgaaggatcagaaggagcccaagaacaagaccttcctgaggtgcgaggccaagaattatagcggcagattcacctgttggtggctgaccacaatctccaccgatctgacattttctgtgaagtctagcaggggctcctctgaccctcagggagtgacatgcggagccgccaccctgagcgccgagcgggtgagaggcgataacaaggagtacgagtattccgtggagtgccaggaggactctgcctgtcccgccgccgaggagtccctgcctatcgaagtgatggtggatgccgtgcacaagctgaagtacgagaattatacaagctccttctttatcagggacatcatcaagcccgatccccctaagaacctgcagctgaagcctctgaagaatagccgccaggtggaggtgtcctgggagtaccctgacacctggagcacaccacactcctatttctctctgaccttttgcgtgcaggtgcagggcaagtctaagagggagaagaaggaccgcgtgttcaccgataagacaagcgccaccgtgatctgtcggaagaacgccagcatctccgtgcgggcccaggatagatactattctagctcctggagcgagtgggcctccgtgccatgttctggaggaggaggcagcggcggaggaggctccggcggcggcggctctaatctgccagtggccacccctgacccaggcatgttcccctgcctgcaccactctcagaacctgctgcgggccgtgagcaatatgctgcagaaggccagacagacactggagttttacccatgtacctccgaggagatcgaccacgaggatatcacaaaggataagacctctacagtggaggcatgcctgccactggagctgaccaagaacgagagctgtctgaacagccgggagacatctttcatcaccaacggcagctgcctggcctccagaaagacatcttttatgatggccctgtgcctgtctagcatctacgaggacctgaagatgtatcaggtggagttcaagaccatgaacgccaagctgctgatggaccctaagaggcagatctttctggatcagaatatgctggccgtgatcgacgagctgatgcaggccctgaacttcaatagcgagacagtgccacagaagtcctctctggaggagcccgatttctacaagaccaagatcaagctgtgcatcctgctgcacgccttccggatcagagccgtgaccatcgaccgcgtgatgagctacctgaacgccagc

SEQ ID NO: 143 - DNA, 2250 bp, Artificial Sequence
  CL_ 22289 Full nt
gagccaaagagctccgacaagacccacacatgccccccttgtccggcgccagaggctgcaggaggaccaagcgtgttcctgtttccacccaagcctaaagacacactgatgatttcccgaacccccgaagtcacatgcgtggtcgtgtctgtgagtcacgaggaccctgaagtcaagttcaactggtacgtggatggcgtcgaggtgcataatgccaagactaaacctagggaggaacagtacaactcaacctatcgcgtcgtgagcgtcctgacagtgctgcaccaggattggctgaacggcaaagaatataagtgcaaagtgagcaataaggccctgcccgctcctatcgagaaaaccatttccaaggctaaagggcagcctcgcgaacctcaggtgtacgtgtatccaccctcccgcgatgagctgacaaagaaccaggtgtctctgacctgtctggtgaagggcttttaccctagcgacatcgccgtggagtgggagtccaatggccagccagagaacaattataagaccacacctccagtgctggactctgatggcagcttcgccctggtgtctaagctgacagtggacaagagcagatggcagcagggcaacgtgttttcttgtagcgtgatgcacgaggccctgcacaatcactacacccagaagtccctgagcttaagccctggaggcagcgccgatggaggaatctgggagctgaagaaggacgtgtacgtggtggagctggactggtatccagatgcaccaggagagatggtggtgctgacctgcgacacaccagaggaggatggcatcacctggacactggatcagagctccgaggtgctgggctccggcaagaccctgacaatccaggtgaaggagttcggcgacgccggacagtacacctgtcacaagggcggcgaggtgctgtcccactctctgctgctgctgcacaagaaggaggacggcatctggagcacagacatcctgaaggatcagaaggagcccaagaacaagaccttcctgaggtgcgaggccaagaattatagcggcagattcacctgttggtggctgaccacaatctccaccgatctgacattttctgtgaagtctagcaggggctcctctgaccctcagggagtgacatgcggagccgccaccctgagcgccgagcgggtgagaggcgataacaaggagtacgagtattccgtggagtgccaggaggactctgcctgtcccgccgccgaggagtccctgcctatcgaagtgatggtggatgccgtgcacaagctgaagtacgagaattatacaagctccttctttatcagggacatcatcaagcccgatccccctaagaacctgcagctgaagcctctgaagaatagccgccaggtggaggtgtcctgggagtaccctgacacctggagcacaccacactcctatttctctctgaccttttgcgtgcaggtgagagacgactctgaggaccgcgtgttcaccgataagacaagcgccaccgtgatctgtcggaagaacgccagcatctccgtgcgggcccaggatagatactattctagctcctggagcgagtgggcctccgtgccatgttctggaggaggaggcagcggcggaggaggctccggcggcggcggctctaatctgccagtggccacccctgacccaggcatgttcccctgcctgcaccactctcagaacctgctgcgggccgtgagcaatatgctgcagaaggccagacagacactggagttttacccatgtacctccgaggagatcgaccacgaggatatcacaaaggataagacctctacagtggaggcatgcctgccactggagctgaccaagaacgagagctgtctgaacagccgggagacatctttcatcaccaacggcagctgcctggcctccagaaagacatcttttatgatggccctgtgcctgtctagcatctacgaggacctgaagatgtatcaggtggagttcaagaccatgaacgccaagctgctgatggaccctaagaggcagatctttctggatcagaatatgctggccgtgatcgacgagctgatgcaggccctgaacttcaatagcgagacagtgccacagaagtcctctctggaggagcccgatttctacaagaccaagatcaagctgtgcatcctgctgcacgccttccggatcagagccgtgaccatcgaccgcgtgatgagctacctgaacgccagc

SEQ ID NO: 144 - DNA, 2256 bp, Artificial Sequence
  CL_ 22290 Full nt
gagccaaagagctccgacaagacccacacatgccccccttgtccggcgccagaggctgcaggaggaccaagcgtgttcctgtttccacccaagcctaaagacacactgatgatttcccgaacccccgaagtcacatgcgtggtcgtgtctgtgagtcacgaggaccctgaagtcaagttcaactggtacgtggatggcgtcgaggtgcataatgccaagactaaacctagggaggaacagtacaactcaacctatcgcgtcgtgagcgtcctgacagtgctgcaccaggattggctgaacggcaaagaatataagtgcaaagtgagcaataaggccctgcccgctcctatcgagaaaaccatttccaaggctaaagggcagcctcgcgaacctcaggtgtacgtgtatccaccctcccgcgatgagctgacaaagaaccaggtgtctctgacctgtctggtgaagggcttttaccctagcgacatcgccgtggagtgggagtccaatggccagccagagaacaattataagaccacacctccagtgctggactctgatggcagcttcgccctggtgtctaagctgacagtggacaagagcagatggcagcagggcaacgtgttttcttgtagcgtgatgcacgaggccctgcacaatcactacacccagaagtccctgagcttaagccctggaggcagcgccgatggaggaatctgggagctgaagaaggacgtgtacgtggtggagctggactggtatccagatgcaccaggagagatggtggtgctgacctgcgacacaccagaggaggatggcatcacctggacactggatcagagctccgaggtgctgggctccggcaagaccctgacaatccaggtgaaggagttcggcgacgccggacagtacacctgtcacaagggcggcgaggtgctgtcccactctctgctgctgctgcacaagaaggaggacggcatctggagcacagacatcctgaaggatcagaaggagcccaagaacaagaccttcctgaggtgcgaggccaagaattatagcggcagattcacctgttggtggctgaccacaatctccaccgatctgacattttctgtgaagtctagcaggggctcctctgaccctcagggagtgacatgcggagccgccaccctgagcgccgagcgggtgagaggcgataacaaggagtacgagtattccgtggagtgccaggaggactctgcctgtcccgccgccgaggagtccctgcctatcgaagtgatggtggatgccgtgcacaagctgaagtacgagaattatacaagctccttctttatcagggacatcatcaagcccgatccccctaagaacctgcagctgaagcctctgaagaatagccgccaggtggaggtgtcctgggagtaccctgacacctggagcacaccacactcctatttctctctgaccttttgcgtgcaggtgcagggcagccaggagaagaaggaccgcgtgttcaccgataagacaagcgccaccgtgatctgtcggaagaacgccagcatctccgtgcgggcccaggatagatactattctagctcctggagcgagtgggcctccgtgccatgttctggaggaggaggcagcggcggaggaggctccggcggcggcggctctaatctgccagtggccacccctgacccaggcatgttcccctgcctgcaccactctcagaacctgctgcgggccgtgagcaatatgctgcagaaggccagacagacactggagttttacccatgtacctccgaggagatcgaccacgaggatatcacaaaggataagacctctacagtggaggcatgcctgccactggagctgaccaagaacgagagctgtctgaacagccgggagacatctttcatcaccaacggcagctgcctggcctccagaaagacatcttttatgatggccctgtgcctgtctagcatctacgaggacctgaagatgtatcaggtggagttcaagaccatgaacgccaagctgctgatggaccctaagaggcagatctttctggatcagaatatgctggccgtgatcgacgagctgatgcaggccctgaacttcaatagcgagacagtgccacagaagtcctctctggaggagcccgatttctacaagaccaagatcaagctgtgcatcctgctgcacgccttccggatcagagccgtgaccatcgaccgcgtgatgagctacctgaacgccagc

SEQ ID NO: 145 - DNA, 2262 bp, Artificial Sequence
  CL_ 22291 Full nt
gagccaaagagctccgacaagacccacacatgccccccttgtccggcgccagaggctgcaggaggaccaagcgtgttcctgtttccacccaagcctaaagacacactgatgatttcccgaacccccgaagtcacatgcgtggtcgtgtctgtgagtcacgaggaccctgaagtcaagttcaactggtacgtggatggcgtcgaggtgcataatgccaagactaaacctagggaggaacagtacaactcaacctatcgcgtcgtgagcgtcctgacagtgctgcaccaggattggctgaacggcaaagaatataagtgcaaagtgagcaataaggccctgcccgctcctatcgagaaaaccatttccaaggctaaagggcagcctcgcgaacctcaggtgtacgtgtatccaccctcccgcgatgagctgacaaagaaccaggtgtctctgacctgtctggtgaagggcttttaccctagcgacatcgccgtggagtgggagtccaatggccagccagagaacaattataagaccacacctccagtgctggactctgatggcagcttcgccctggtgtctaagctgacagtggacaagagcagatggcagcagggcaacgtgttttcttgtagcgtgatgcacgaggccctgcacaatcactacacccagaagtccctgagcttaagccctggaggcagcgccgatggaggaatctgggagctgaagaaggacgtgtacgtggtggagctggactggtatccagatgcaccaggagagatggtggtgctgacctgcgacacaccagaggaggatggcatcacctggacactggatcagagctccgaggtgctgggctccggcaagaccctgacaatccaggtgaaggagttcggcgacgccggacagtacacctgtcacaagggcggcgaggtgctgtcccactctctgctgctgctgcacaagaaggaggacggcatctggagcacagacatcctgaaggatcagaaggagcccaagaacaagaccttcctgaggtgcgaggccaagaattatagcggcagattcacctgttggtggctgaccacaatctccaccgatctgacattttctgtgaagtctagcaggggctcctctgaccctcagggagtgacatgcggagccgccaccctgagcgccgagcgggtgagaggcgataacaaggagtacgagtattccgtggagtgccaggaggactctgcctgtcccgccgccgaggagtccctgcctatcgaagtgatggtggatgccgtgcacaagctgaagtacgagaattatacaagctccttctttatcagggacatcatcaagcccgatccccctaagaacctgcagctgaagcctctgaagaatagccgccaggtggaggtgtcctgggagtaccctgacacctggagcacaccacactcctatttctctctgaccttttgcgtgcaggtgcagggcgagtctaagcaggagaagaaggaccgcgtgttcaccgataagacaagcgccaccgtgatctgtcggaagaacgccagcatctccgtgcgggcccaggatagatactattctagctcctggagcgagtgggcctccgtgccatgttctggaggaggaggcagcggcggaggaggctccggcggcggcggctctaatctgccagtggccacccctgacccaggcatgttcccctgcctgcaccactctcagaacctgctgcgggccgtgagcaatatgctgcagaaggccagacagacactggagttttacccatgtacctccgaggagatcgaccacgaggatatcacaaaggataagacctctacagtggaggcatgcctgccactggagctgaccaagaacgagagctgtctgaacagccgggagacatctttcatcaccaacggcagctgcctggcctccagaaagacatcttttatgatggccctgtgcctgtctagcatctacgaggacctgaagatgtatcaggtggagttcaagaccatgaacgccaagctgctgatggaccctaagaggcagatctttctggatcagaatatgctggccgtgatcgacgagctgatgcaggccctgaacttcaatagcgagacagtgccacagaagtcctctctggaggagcccgatttctacaagaccaagatcaagctgtgcatcctgctgcacgccttccggatcagagccgtgaccatcgaccgcgtgatgagctacctgaacgccagc

SEQ ID NO: 146 - DNA, 2250 bp, Artificial Sequence
  CL_ 22292 Full nt
gagccaaagagctccgacaagacccacacatgccccccttgtccggcgccagaggctgcaggaggaccaagcgtgttcctgtttccacccaagcctaaagacacactgatgatttcccgaacccccgaagtcacatgcgtggtcgtgtctgtgagtcacgaggaccctgaagtcaagttcaactggtacgtggatggcgtcgaggtgcataatgccaagactaaacctagggaggaacagtacaactcaacctatcgcgtcgtgagcgtcctgacagtgctgcaccaggattggctgaacggcaaagaatataagtgcaaagtgagcaataaggccctgcccgctcctatcgagaaaaccatttccaaggctaaagggcagcctcgcgaacctcaggtgtacgtgtatccaccctcccgcgatgagctgacaaagaaccaggtgtctctgacctgtctggtgaagggcttttaccctagcgacatcgccgtggagtgggagtccaatggccagccagagaacaattataagaccacacctccagtgctggactctgatggcagcttcgccctggtgtctaagctgacagtggacaagagcagatggcagcagggcaacgtgttttcttgtagcgtgatgcacgaggccctgcacaatcactacacccagaagtccctgagcttaagccctggaggcagcgccgatggaggaatctgggagctgaagaaggacgtgtacgtggtggagctggactggtatccagatgcaccaggagagatggtggtgctgacctgcgacacaccagaggaggatggcatcacctggacactggatcagagctccgaggtgctgggctccggcaagaccctgacaatccaggtgaaggagttcggcgacgccggacagtacacctgtcacaagggcggcgaggtgctgtcccactctctgctgctgctgcacaagaaggaggacggcatctggagcacagacatcctgaaggatcagaaggagcccaagaacaagaccttcctgaggtgcgaggccaagaattatagcggcagattcacctgttggtggctgaccacaatctccaccgatctgacattttctgtgaagtctagcaggggctcctctgaccctcagggagtgacatgcggagccgccaccctgagcgccgagcgggtgagaggcgataacaaggagtacgagtattccgtggagtgccaggaggactctgcctgtcccgccgccgaggagtccctgcctatcgaagtgatggtggatgccgtgcacaagctgaagtacgagaattatacaagctccttctttatcagggacatcatcaagcccgatccccctaagaacctgcagctgaagcctctgaagaatagccgccaggtggaggtgtcctgggagtaccctgacacctggagcacaccacactcctatttctctctgaccttttgcgtgcaggtgcagggcgagaagaaggaccgcgtgttcaccgataagacaagcgccaccgtgatctgtcggaagaacgccagcatctccgtgcgggcccaggatagatactattctagctcctggagcgagtgggcctccgtgccatgttctggaggaggaggcagcggcggaggaggctccggcggcggcggctctaatctgccagtggccacccctgacccaggcatgttcccctgcctgcaccactctcagaacctgctgcgggccgtgagcaatatgctgcagaaggccagacagacactggagttttacccatgtacctccgaggagatcgaccacgaggatatcacaaaggataagacctctacagtggaggcatgcctgccactggagctgaccaagaacgagagctgtctgaacagccgggagacatctttcatcaccaacggcagctgcctggcctccagaaagacatcttttatgatggccctgtgcctgtctagcatctacgaggacctgaagatgtatcaggtggagttcaagaccatgaacgccaagctgctgatggaccctaagaggcagatctttctggatcagaatatgctggccgtgatcgacgagctgatgcaggccctgaacttcaatagcgagacagtgccacagaagtcctctctggaggagcccgatttctacaagaccaagatcaagctgtgcatcctgctgcacgccttccggatcagagccgtgaccatcgaccgcgtgatgagctacctgaacgccagc

SEQ ID NO: 147 - DNA, 2250 bp, Artificial Sequence
  CL_ 22293 Full nt
gagccaaagagctccgacaagacccacacatgccccccttgtccggcgccagaggctgcaggaggaccaagcgtgttcctgtttccacccaagcctaaagacacactgatgatttcccgaacccccgaagtcacatgcgtggtcgtgtctgtgagtcacgaggaccctgaagtcaagttcaactggtacgtggatggcgtcgaggtgcataatgccaagactaaacctagggaggaacagtacaactcaacctatcgcgtcgtgagcgtcctgacagtgctgcaccaggattggctgaacggcaaagaatataagtgcaaagtgagcaataaggccctgcccgctcctatcgagaaaaccatttccaaggctaaagggcagcctcgcgaacctcaggtgtacgtgtatccaccctcccgcgatgagctgacaaagaaccaggtgtctctgacctgtctggtgaagggcttttaccctagcgacatcgccgtggagtgggagtccaatggccagccagagaacaattataagaccacacctccagtgctggactctgatggcagcttcgccctggtgtctaagctgacagtggacaagagcagatggcagcagggcaacgtgttttcttgtagcgtgatgcacgaggccctgcacaatcactacacccagaagtccctgagcttaagccctggaggcagcgccgatggaggaatctgggagctgaagaaggacgtgtacgtggtggagctggactggtatccagatgcaccaggagagatggtggtgctgacctgcgacacaccagaggaggatggcatcacctggacactggatcagagctccgaggtgctgggctccggcaagaccctgacaatccaggtgaaggagttcggcgacgccggacagtacacctgtcacaagggcggcgaggtgctgtcccactctctgctgctgctgcacaagaaggaggacggcatctggagcacagacatcctgaaggatcagaaggagcccaagaacaagaccttcctgaggtgcgaggccaagaattatagcggcagattcacctgttggtggctgaccacaatctccaccgatctgacattttctgtgaagtctagcaggggctcctctgaccctcagggagtgacatgcggagccgccaccctgagcgccgagcgggtgagaggcgataacaaggagtacgagtattccgtggagtgccaggaggactctgcctgtcccgccgccgaggagtccctgcctatcgaagtgatggtggatgccgtgcacaagctgaagtacgagaattatacaagctccttctttatcagggacatcatcaagcccgatccccctaagaacctgcagctgaagcctctgaagaatagccgccaggtggaggtgtcctgggagtaccctgacacctggagcacaccacactcctatttctctctgaccttttgcgtgcaggtgcaggaccagaccgacgaccgcgtgttcaccgataagacaagcgccaccgtgatctgtcggaagaacgccagcatctccgtgcgggcccaggatagatactattctagctcctggagcgagtgggcctccgtgccatgttctggaggaggaggcagcggcggaggaggctccggcggcggcggctctaatctgccagtggccacccctgacccaggcatgttcccctgcctgcaccactctcagaacctgctgcgggccgtgagcaatatgctgcagaaggccagacagacactggagttttacccatgtacctccgaggagatcgaccacgaggatatcacaaaggataagacctctacagtggaggcatgcctgccactggagctgaccaagaacgagagctgtctgaacagccgggagacatctttcatcaccaacggcagctgcctggcctccagaaagacatcttttatgatggccctgtgcctgtctagcatctacgaggacctgaagatgtatcaggtggagttcaagaccatgaacgccaagctgctgatggaccctaagaggcagatctttctggatcagaatatgctggccgtgatcgacgagctgatgcaggccctgaacttcaatagcgagacagtgccacagaagtcctctctggaggagcccgatttctacaagaccaagatcaagctgtgcatcctgctgcacgccttccggatcagagccgtgaccatcgaccgcgtgatgagctacctgaacgccagc

SEQ ID NO: 148 - DNA, 2250 bp, Artificial Sequence
  CL_ 22294 Full nt
gagccaaagagctccgacaagacccacacatgccccccttgtccggcgccagaggctgcaggaggaccaagcgtgttcctgtttccacccaagcctaaagacacactgatgatttcccgaacccccgaagtcacatgcgtggtcgtgtctgtgagtcacgaggaccctgaagtcaagttcaactggtacgtggatggcgtcgaggtgcataatgccaagactaaacctagggaggaacagtacaactcaacctatcgcgtcgtgagcgtcctgacagtgctgcaccaggattggctgaacggcaaagaatataagtgcaaagtgagcaataaggccctgcccgctcctatcgagaaaaccatttccaaggctaaagggcagcctcgcgaacctcaggtgtacgtgtatccaccctcccgcgatgagctgacaaagaaccaggtgtctctgacctgtctggtgaagggcttttaccctagcgacatcgccgtggagtgggagtccaatggccagccagagaacaattataagaccacacctccagtgctggactctgatggcagcttcgccctggtgtctaagctgacagtggacaagagcagatggcagcagggcaacgtgttttcttgtagcgtgatgcacgaggccctgcacaatcactacacccagaagtccctgagcttaagccctggaggcagcgccgatggaggaatctgggagctgaagaaggacgtgtacgtggtggagctggactggtatccagatgcaccaggagagatggtggtgctgacctgcgacacaccagaggaggatggcatcacctggacactggatcagagctccgaggtgctgggctccggcaagaccctgacaatccaggtgaaggagttcggcgacgccggacagtacacctgtcacaagggcggcgaggtgctgtcccactctctgctgctgctgcacaagaaggaggacggcatctggagcacagacatcctgaaggatcagaaggagcccaagaacaagaccttcctgaggtgcgaggccaagaattatagcggcagattcacctgttggtggctgaccacaatctccaccgatctgacattttctgtgaagtctagcaggggctcctctgaccctcagggagtgacatgcggagccgccaccctgagcgccgagcgggtgagaggcgataacaaggagtacgagtattccgtggagtgccaggaggactctgcctgtcccgccgccgaggagtccctgcctatcgaagtgatggtggatgccgtgcacaagctgaagtacgagaattatacaagctccttctttatcagggacatcatcaagcccgatccccctaagaacctgcagctgaagcctctgaagaatagccgccaggtggaggtgtcctgggagtaccctgacacctggagcacaccacactcctatttctctctgaccttttgcgtgcaggtgcaggacgactctgaggaccgcgtgttcaccgataagacaagcgccaccgtgatctgtcggaagaacgccagcatctccgtgcgggcccaggatagatactattctagctcctggagcgagtgggcctccgtgccatgttctggaggaggaggcagcggcggaggaggctccggcggcggcggctctaatctgccagtggccacccctgacccaggcatgttcccctgcctgcaccactctcagaacctgctgcgggccgtgagcaatatgctgcagaaggccagacagacactggagttttacccatgtacctccgaggagatcgaccacgaggatatcacaaaggataagacctctacagtggaggcatgcctgccactggagctgaccaagaacgagagctgtctgaacagccgggagacatctttcatcaccaacggcagctgcctggcctccagaaagacatcttttatgatggccctgtgcctgtctagcatctacgaggacctgaagatgtatcaggtggagttcaagaccatgaacgccaagctgctgatggaccctaagaggcagatctttctggatcagaatatgctggccgtgatcgacgagctgatgcaggccctgaacttcaatagcgagacagtgccacagaagtcctctctggaggagcccgatttctacaagaccaagatcaagctgtgcatcctgctgcacgccttccggatcagagccgtgaccatcgaccgcgtgatgagctacctgaacgccagc

SEQ ID NO: 149 - DNA, 2250 bp, Artificial Sequence
  CL_ 22295 Full nt
gagccaaagagctccgacaagacccacacatgccccccttgtccggcgccagaggctgcaggaggaccaagcgtgttcctgtttccacccaagcctaaagacacactgatgatttcccgaacccccgaagtcacatgcgtggtcgtgtctgtgagtcacgaggaccctgaagtcaagttcaactggtacgtggatggcgtcgaggtgcataatgccaagactaaacctagggaggaacagtacaactcaacctatcgcgtcgtgagcgtcctgacagtgctgcaccaggattggctgaacggcaaagaatataagtgcaaagtgagcaataaggccctgcccgctcctatcgagaaaaccatttccaaggctaaagggcagcctcgcgaacctcaggtgtacgtgtatccaccctcccgcgatgagctgacaaagaaccaggtgtctctgacctgtctggtgaagggcttttaccctagcgacatcgccgtggagtgggagtccaatggccagccagagaacaattataagaccacacctccagtgctggactctgatggcagcttcgccctggtgtctaagctgacagtggacaagagcagatggcagcagggcaacgtgttttcttgtagcgtgatgcacgaggccctgcacaatcactacacccagaagtccctgagcttaagccctggaggcagcgccgatggaggaatctgggagctgaagaaggacgtgtacgtggtggagctggactggtatccagatgcaccaggagagatggtggtgctgacctgcgacacaccagaggaggatggcatcacctggacactggatcagagctccgaggtgctgggctccggcaagaccctgacaatccaggtgaaggagttcggcgacgccggacagtacacctgtcacaagggcggcgaggtgctgtcccactctctgctgctgctgcacaagaaggaggacggcatctggagcacagacatcctgaaggatcagaaggagcccaagaacaagaccttcctgaggtgcgaggccaagaattatagcggcagattcacctgttggtggctgaccacaatctccaccgatctgacattttctgtgaagtctagcaggggctcctctgaccctcagggagtgacatgcggagccgccaccctgagcgccgagcgggtgagaggcgataacaaggagtacgagtattccgtggagtgccaggaggactctgcctgtcccgccgccgaggagtccctgcctatcgaagtgatggtggatgccgtgcacaagctgaagtacgagaattatacaagctccttctttatcagggacatcatcaagcccgatccccctaagaacctgcagctgaagcctctgaagaatagccgccaggtggaggtgtcctgggagtaccctgacacctggagcacaccacactcctatttctctctgaccttttgcgtgcaggtgaaggaccagaccgaggaccgcgtgttcaccgataagacaagcgccaccgtgatctgtcggaagaacgccagcatctccgtgcgggcccaggatagatactattctagctcctggagcgagtgggcctccgtgccatgttctggaggaggaggcagcggcggaggaggctccggcggcggcggctctaatctgccagtggccacccctgacccaggcatgttcccctgcctgcaccactctcagaacctgctgcgggccgtgagcaatatgctgcagaaggccagacagacactggagttttacccatgtacctccgaggagatcgaccacgaggatatcacaaaggataagacctctacagtggaggcatgcctgccactggagctgaccaagaacgagagctgtctgaacagccgggagacatctttcatcaccaacggcagctgcctggcctccagaaagacatcttttatgatggccctgtgcctgtctagcatctacgaggacctgaagatgtatcaggtggagttcaagaccatgaacgccaagctgctgatggaccctaagaggcagatctttctggatcagaatatgctggccgtgatcgacgagctgatgcaggccctgaacttcaatagcgagacagtgccacagaagtcctctctggaggagcccgatttctacaagaccaagatcaagctgtgcatcctgctgcacgccttccggatcagagccgtgaccatcgaccgcgtgatgagctacctgaacgccagc

SEQ ID NO: 150 - DNA, 2250 bp, Artificial Sequence
  CL_ 22296 Full nt
gagccaaagagctccgacaagacccacacatgccccccttgtccggcgccagaggctgcaggaggaccaagcgtgttcctgtttccacccaagcctaaagacacactgatgatttcccgaacccccgaagtcacatgcgtggtcgtgtctgtgagtcacgaggaccctgaagtcaagttcaactggtacgtggatggcgtcgaggtgcataatgccaagactaaacctagggaggaacagtacaactcaacctatcgcgtcgtgagcgtcctgacagtgctgcaccaggattggctgaacggcaaagaatataagtgcaaagtgagcaataaggccctgcccgctcctatcgagaaaaccatttccaaggctaaagggcagcctcgcgaacctcaggtgtacgtgtatccaccctcccgcgatgagctgacaaagaaccaggtgtctctgacctgtctggtgaagggcttttaccctagcgacatcgccgtggagtgggagtccaatggccagccagagaacaattataagaccacacctccagtgctggactctgatggcagcttcgccctggtgtctaagctgacagtggacaagagcagatggcagcagggcaacgtgttttcttgtagcgtgatgcacgaggccctgcacaatcactacacccagaagtccctgagcttaagccctggaggcagcgccgatggaggaatctgggagctgaagaaggacgtgtacgtggtggagctggactggtatccagatgcaccaggagagatggtggtgctgacctgcgacacaccagaggaggatggcatcacctggacactggatcagagctccgaggtgctgggctccggcaagaccctgacaatccaggtgaaggagttcggcgacgccggacagtacacctgtcacaagggcggcgaggtgctgtcccactctctgctgctgctgcacaagaaggaggacggcatctggagcacagacatcctgaaggatcagaaggagcccaagaacaagaccttcctgaggtgcgaggccaagaattatagcggcagattcacctgttggtggctgaccacaatctccaccgatctgacattttctgtgaagtctagcaggggctcctctgaccctcagggagtgacatgcggagccgccaccctgagcgccgagcgggtgagaggcgataacaaggagtacgagtattccgtggagtgccaggaggactctgcctgtcccgccgccgaggagtccctgcctatcgaagtgatggtggatgccgtgcacaagctgaagtacgagaattatacaagctccttctttatcagggacatcatcaagcccgatccccctaagaacctgcagctgaagcctctgaagaatagccgccaggtggaggtgtcctgggagtaccctgacacctggagcacaccacactcctatttctctctgaccttttgcgtgcaggtgcagggcagcgagaaggaccgcgtgttcaccgataagacaagcgccaccgtgatctgtcggaagaacgccagcatctccgtgcgggcccaggatagatactattctagctcctggagcgagtgggcctccgtgccatgttctggaggaggaggcagcggcggaggaggctccggcggcggcggctctaatctgccagtggccacccctgacccaggcatgttcccctgcctgcaccactctcagaacctgctgcgggccgtgagcaatatgctgcagaaggccagacagacactggagttttacccatgtacctccgaggagatcgaccacgaggatatcacaaaggataagacctctacagtggaggcatgcctgccactggagctgaccaagaacgagagctgtctgaacagccgggagacatctttcatcaccaacggcagctgcctggcctccagaaagacatcttttatgatggccctgtgcctgtctagcatctacgaggacctgaagatgtatcaggtggagttcaagaccatgaacgccaagctgctgatggaccctaagaggcagatctttctggatcagaatatgctggccgtgatcgacgagctgatgcaggccctgaacttcaatagcgagacagtgccacagaagtcctctctggaggagcccgatttctacaagaccaagatcaagctgtgcatcctgctgcacgccttccggatcagagccgtgaccatcgaccgcgtgatgagctacctgaacgccagc

SEQ ID NO: 151 - DNA, 1686 bp, Artificial Sequence
  CL_ 22672 Full nt
gagccaaagagctccgacaagacccacacatgccccccttgtccggcgccagaggcagcaggaggaccaagcgtgttcctgtttccacccaagcccaaagacaccctgatgattagccgaacccctgaagtcacatgcgtggtcgtgtccgtgtctcacgaggacccagaagtcaagttcaactggtacgtggatggcgtcgaggtgcataatgccaagacaaaaccccgggaggaacagtacaacagcacctatagagtcgtgtccgtcctgacagtgctgcaccaggattggctgaacggcaaggaatataagtgcaaagtgtccaataaggccctgcccgctcctatcgagaaaaccatttctaaggcaaaaggccagcctcgcgagcctcaggtgtacgtgctgccaccttcccgcgacgagctgaccaagaatcaggtgtctctgctgtgcctggtgaagggcttctatccaagcgatatcgcagtggagtgggagtccaacggacagcccgagaacaattacctgacctggccacccgtgctggacagcgatggctccttctttctgtattccaagctgacagtggacaagtctagatggcagcagggcaacgtgttcagctgttccgtgatgcacgaggccctgcacaaccactacacccagaagtctctgagcttaagcccaggaggaggaggaggctctatgagcggcaggagcgccaatgccggaggaggaggcagcggaggaggaggctccggaggcggcggctctggcggcggcggcagcaagatcgacgcctgcaagcgcggcgatgtgacagtgaagcctagccacgtgatcctgctgggctccaccgtgaatatcacatgctctctgaagccacggcagggctgtttccactactcccggagaaacaagctgatcctgtataagttcgacaggcgcatcaactttcaccacggccactctctgaatagccaggtgaccggactgccactgggcaccacactgttcgtgtgcaagctggcctgtatcaatagcgatgagatccagatctgtggagccgagatctttgtgggagtggcccccgagcagcctcagaacctgtcctgcatccagaagggagagcagggaaccgtggcatgtacatgggagcggggcagagacacccacctgtacaccgagtatacactgcagctgagcggccccaagaacctgacatggcagaagcagtgcaaggatatctactgtgactatctggatttcggcatcaacctgaccccagagtcccccgagtctaacttcaccgccaaggtgacagccgtgaactctctgggcagctcctctagcctgcccagcaccttcacatttctggacatcgtgcgccctctgcctccatgggatatccggatcaagtttcagaaggcctccgtgtctagatgcacactgtactggagggacgagggcctggtgctgctgaacaggctgcgctatagacccagcaattccagactgtggaacatggtgaatgtgaccaaggccaagggcaggcacgacctgctggatctgaagcctttcacagagtacgagtttcagatctcctctaagctgcacctgtataagggctcttggagcgattggtccgagtctctgagggcacagacccctgaggaggagcca

SEQ ID NO: 152 - DNA, 1524 bp, Artificial Sequence
  CL_ 22735 Full nt
gagccaaagagctccgacaagacccacacatgccccccttgtccggcgccagaggcagcaggaggaccaagcgtgttcctgtttccacccaagcccaaagacaccctgatgattagccgaacccctgaagtcacatgcgtggtcgtgtccgtgtctcacgaggacccagaagtcaagttcaactggtacgtggatggcgtcgaggtgcataatgccaagacaaaaccccgggaggaacagtacaacagcacctatagagtcgtgtccgtcctgacagtgctgcaccaggattggctgaacggcaaggaatataagtgcaaagtgtccaataaggccctgcccgctcctatcgagaaaaccatttctaaggcaaaaggccagcctcgcgagcctcaggtgtacgtgctgccaccttcccgcgacgagctgaccaagaatcaggtgtctctgctgtgcctggtgaagggcttctatccaagcgatatcgcagtggagtgggagtccaacggacagcccgagaacaattacctgacctggccacccgtgctggacagcgatggctccttctttctgtattccaagctgacagtggacaagtctagatggcagcagggcaacgtgttcagctgttccgtgatgcacgaggccctgcacaaccactacacccagaagtctctgagcttaagccctggaggaggaggaggctctggaggaggaggctccatgagcgggcggagcgccaacgcagggggcggcggctctggcggcggcggcagccaggtgcagctggtggagagcggcggcggcgtggtgcagcccggcagaagcctgcggctgagctgcgcagcctctggcttcacctttagctcctacggcatgcactgggtgcggcaggcccctggcaagggactggagtgggtggccttcatcagatatgacggctccaataagtactatgccgattctgtgaagggcaggtttaccatcagccgcgacaactccaagaatacactgtacctgcagatgaactccctgagggccgaggacaccgccgtgtactattgcaagacacacggctctcacgataattggggccagggcaccatggtgacagtgtcttccggaggaggaggcagcatgagcgggcggagcgccaacgcagggggtggaggctccggaggaggaggctctcagagcgtgctgacccagccaccttccgtgtctggagcccccggacagagggtgacaatcagctgttccggctctcgcagcaacatcggcagcaataccgtgaagtggtatcagcagctgccaggcacagcccccaagctgctgatctactataatgaccagcggccttccggcgtgccagatagattctccggctctaagagcggcacctccgcctctctggccatcacaggcctgcaggcagaggacgaggcagattactattgtcagtcctacgatagatatacccaccccgccctgctgtttggcaccggcacaaaggtgacagtgctg

SEQ ID NO: 153 - DNA, 1515 bp, Artificial Sequence
  CL_ 23360 Full nt
gagccaaagagctccgacaagacccacacatgccccccttgtccggcgccagaggcagcaggaggaccaagcgtgttcctgtttccacccaagcccaaagacaccctgatgattagccgaacccctgaagtcacatgcgtggtcgtgtccgtgtctcacgaggacccagaagtcaagttcaactggtacgtggatggcgtcgaggtgcataatgccaagacaaaaccccgggaggaacagtacaacagcacctatagagtcgtgtccgtcctgacagtgctgcaccaggattggctgaacggcaaggaatataagtgcaaagtgtccaataaggccctgcccgctcctatcgagaaaaccatttctaaggcaaaaggccagcctcgcgagcctcaggtgtacgtgctgccaccttcccgcgacgagctgaccaagaatcaggtgtctctgctgtgcctggtgaagggcttctatccaagcgatatcgcagtggagtgggagtccaacggacagcccgagaacaattacctgacctggccacccgtgctggacagcgatggctccttctttctgtattccaagctgacagtggacaagtctagatggcagcagggcaacgtgttcagctgttccgtgatgcacgaggccctgcacaaccactacacccagaagtctctgagcttaagcccaggaggaggaggaggctccggcggaggaggctccatgagcgggcggagcgccaacgcagggggcggcggctctggcggcggcggcagccagtccgtgctgacccagccaccttctgtgagcggagcccccggacagagggtgacaatctcctgctctggcagccgctccaacatcggctctaataccgtgaagtggtatcagcagctgccaggcacagcccccaagctgctgatctactataatgaccagcggcctagcggcgtgccagatagattctctggcagcaagtccggcacctctgccagcctggccatcacaggcctgcaggcagaggacgaggcagattactattgccagtcctacgaccgctatacccaccctgccctgctgtttggcaccggcacaaaggtgacagtgctgggcggctccggcggcggctctggaggaggcagcggcggcggctccggaggaggctctggccaggtgcagctggtggagagcggaggaggagtggtgcagcccggcagaagcctgcggctgagctgtgcagcctctggcttcacctttagctcctacggcatgcactgggtgcggcaggcccctggcaagggactggagtgggtggccttcatcagatatgacggctctaacaagtactatgccgatagcgtgaagggcaggtttaccatcagccgcgataactccaagaatacactgtatctgcagatgaacagcctgcgggcagaggacaccgccgtgtactattgtaagacacacggctcccacgataattggggccagggcaccatggtgacagtgtctagc

SEQ ID NO: 154 - DNA, 1515 bp, Artificial Sequence
  CL_ 23361 Full nt
gagccaaagagctccgacaagacccacacatgccccccttgtccggcgccagaggcagcaggaggaccaagcgtgttcctgtttccacccaagcccaaagacaccctgatgattagccgaacccctgaagtcacatgcgtggtcgtgtccgtgtctcacgaggacccagaagtcaagttcaactggtacgtggatggcgtcgaggtgcataatgccaagacaaaaccccgggaggaacagtacaacagcacctatagagtcgtgtccgtcctgacagtgctgcaccaggattggctgaacggcaaggaatataagtgcaaagtgtccaataaggccctgcccgctcctatcgagaaaaccatttctaaggcaaaaggccagcctcgcgagcctcaggtgtacgtgctgccaccttcccgcgacgagctgaccaagaatcaggtgtctctgctgtgcctggtgaagggcttctatccaagcgatatcgcagtggagtgggagtccaacggacagcccgagaacaattacctgacctggccacccgtgctggacagcgatggctccttctttctgtattccaagctgacagtggacaagtctagatggcagcagggcaacgtgttcagctgttccgtgatgcacgaggccctgcacaaccactacacccagaagtctctgagcttaagcccaggaggaggaggaggctccggcggaggaggctccatgagcgggcggagcgccaacgcagggggcggcggctctggcggcggcggcagccagtccgtgctgacccagccaccttctgtgagcggagcccccggacagagggtgacaatctcctgctctggcagccgctccaacatcggctctaataccgtgaagtggtatcagcagctgccaggcacagcccccaagctgctgatctactataatgaccagcggcctagcggcgtgccagatagattctctggcagcaagtccggcacctctgccagcctggccatcacaggcctgcaggcagaggacgaggcagattactattgccagtcctacgaccgctatacccaccctgccctgctgtttggctgcggcacaaaggtgacagtgctgggcggctccggcggcggctctggaggaggcagcggcggcggctccggaggaggctctggccaggtgcagctggtggagagcggaggaggagtggtgcagcccggcagaagcctgcggctgagctgtgcagcctctggcttcacctttagctcctacggcatgcactgggtgcggcaggcccctggcaagtgcctggagtgggtggccttcatcagatatgacggctctaacaagtactatgccgatagcgtgaagggcaggtttaccatcagccgcgataactccaagaatacactgtatctgcagatgaacagcctgcgggcagaggacaccgccgtgtactattgtaagacacacggctcccacgataattggggccagggcaccatggtgacagtgtctagc

SEQ ID NO: 155 - DNA, 1539 bp, Artificial Sequence
  CL_ 23363 Full nt
gagccaaagagctccgacaagacccacacatgccccccttgtccggcgccagaggcagcaggaggaccaagcgtgttcctgtttccacccaagcccaaagacaccctgatgattagccgaacccctgaagtcacatgcgtggtcgtgtccgtgtctcacgaggacccagaagtcaagttcaactggtacgtggatggcgtcgaggtgcataatgccaagacaaaaccccgggaggaacagtacaacagcacctatagagtcgtgtccgtcctgacagtgctgcaccaggattggctgaacggcaaggaatataagtgcaaagtgtccaataaggccctgcccgctcctatcgagaaaaccatttctaaggcaaaaggccagcctcgcgagcctcaggtgtacgtgctgccaccttcccgcgacgagctgaccaagaatcaggtgtctctgctgtgcctggtgaagggcttctatccaagcgatatcgcagtggagtgggagtccaacggacagcccgagaacaattacctgacctggccacccgtgctggacagcgatggctccttctttctgtattccaagctgacagtggacaagtctagatggcagcagggcaacgtgttcagctgttccgtgatgcacgaggccctgcacaaccactacacccagaagtctctgagcttaagccctggaggaggaggaggctccggcggaggaggctccatgagcgggcggagcgccaacgcagggggcggcggctccggcggcggcggctctcaggtgcagctggtggagagcggaggaggagtggtgcagcccggcagaagcctgcggctgagctgcgcagcctctggcttcacctttagctcctacggcatgcactgggtgcggcaggcccctggcaagggactggagtgggtggccttcatcagatatgacggcagcaataagtactatgccgattccgtgaagggcaggtttaccatcagccgcgacaactccaagaatacactgtacctgcagatgaacagcctgagggccgaggacaccgccgtgtactattgtaagacacacggctcccacgataattggggccagggcaccatggtgacagtgtctagcggcggctctggcggcggcagcatgagcgggcggagcgccaacgcagggggtggctctggaggaggcagcggaggaggctccggccagtctgtgctgacccagccaccttctgtgagcggagcccccggacagagggtgacaatctcctgctctggcagccgctccaacatcggcagcaataccgtgaagtggtatcagcagctgccaggcacagcccccaagctgctgatctactataatgaccagcggccttccggcgtgccagatagattctctggcagcaagtccggcacctctgccagcctggccatcacaggcctgcaggcagaggacgaggcagattactattgtcagtcctacgatagatatacccaccccgccctgctgtttggcaccggcacaaaggtgacagtgctg

SEQ ID NO: 156 - DNA, 1539 bp, Artificial Sequence
  CL_ 23364 Full nt
gagccaaagagctccgacaagacccacacatgccccccttgtccggcgccagaggcagcaggaggaccaagcgtgttcctgtttccacccaagcccaaagacaccctgatgattagccgaacccctgaagtcacatgcgtggtcgtgtccgtgtctcacgaggacccagaagtcaagttcaactggtacgtggatggcgtcgaggtgcataatgccaagacaaaaccccgggaggaacagtacaacagcacctatagagtcgtgtccgtcctgacagtgctgcaccaggattggctgaacggcaaggaatataagtgcaaagtgtccaataaggccctgcccgctcctatcgagaaaaccatttctaaggcaaaaggccagcctcgcgagcctcaggtgtacgtgctgccaccttcccgcgacgagctgaccaagaatcaggtgtctctgctgtgcctggtgaagggcttctatccaagcgatatcgcagtggagtgggagtccaacggacagcccgagaacaattacctgacctggccacccgtgctggacagcgatggctccttctttctgtattccaagctgacagtggacaagtctagatggcagcagggcaacgtgttcagctgttccgtgatgcacgaggccctgcacaaccactacacccagaagtctctgagcttaagccctggaggaggaggaggctccggcggaggaggctccatgagcgggcggagcgccaacgcagggggcggcggctccggcggcggcggctctcaggtgcagctggtggagagcggaggaggagtggtgcagcccggcagaagcctgcggctgagctgcgcagcctctggcttcacctttagctccgccggcatgcactgggtgcggcaggcccctggcaagggactggagtgggtggccttcatcagatatgacggcagcaataagtactatgccgattccgtgaagggcaggtttaccatcagccgcgacaactccaagaatacactgtacctgcagatgaacagcctgagggccgaggacaccgccgtgtactattgtaagacacacggctcccacgataattggggccagggcaccatggtgacagtgtctagcggcggctctggcggcggcagcatgagcgggcggagcgccaacgcagggggtggctctggaggaggcagcggaggaggctccggccagtctgtgctgacccagccaccttctgtgagcggagcccccggacagagggtgacaatctcctgctctggcagccgctccaacatcggcagcaataccgtgaagtggtatcagcagctgccaggcacagcccccaagctgctgatctactataatgaccagcggccttccggcgtgccagatagattctctggcagcaagtccggcacctctgccagcctggccatcacaggcctgcaggcagaggacgaggcagattactattgtcagtcctacgatagatatacccaccccgccctgctgtttggcaccggcacaaaggtgacagtgctg

SEQ ID NO: 157 - DNA, 1524 bp, Artificial Sequence
  CL_ 23512 Full nt
gagccaaagagctccgacaagacccacacatgccccccttgtccggcgccagaggcagcaggaggaccaagcgtgttcctgtttccacccaagcccaaagacaccctgatgattagccgaacccctgaagtcacatgcgtggtcgtgtccgtgtctcacgaggacccagaagtcaagttcaactggtacgtggatggcgtcgaggtgcataatgccaagacaaaaccccgggaggaacagtacaacagcacctatagagtcgtgtccgtcctgacagtgctgcaccaggattggctgaacggcaaggaatataagtgcaaagtgtccaataaggccctgcccgctcctatcgagaaaaccatttctaaggcaaaaggccagcctcgcgagcctcaggtgtacgtgctgccaccttcccgcgacgagctgaccaagaatcaggtgtctctgctgtgcctggtgaagggcttctatccaagcgatatcgcagtggagtgggagtccaacggacagcccgagaacaattacctgacctggccacccgtgctggacagcgatggctccttctttctgtattccaagctgacagtggacaagtctagatggcagcagggcaacgtgttcagctgttccgtgatgcacgaggccctgcacaaccactacacccagaagtctctgagcttaagccctggaggaggaggaggctctggaggaggaggctccggcggcgggagcggcggcggcagcgggggcggcggctctggcggcggcggcagccaggtgcagctggtggagagcggcggcggcgtggtgcagcccggcagaagcctgcggctgagctgcgcagcctctggcttcacctttagctcctacggcatgcactgggtgcggcaggcccctggcaagggactggagtgggtggccttcatcagatatgacggctccaataagtactatgccgattctgtgaagggcaggtttaccatcagccgcgacaactccaagaatacactgtacctgcagatgaactccctgagggccgaggacaccgccgtgtactattgcaagacacacggctctcacgataattggggccagggcaccatggtgacagtgtcttccggaggaggaggcagcggcggcgggagcggcggcggcagcgggggtggaggctccggaggaggaggctctcagagcgtgctgacccagccaccttccgtgtctggagcccccggacagagggtgacaatcagctgttccggctctcgcagcaacatcggcagcaataccgtgaagtggtatcagcagctgccaggcacagcccccaagctgctgatctactataatgaccagcggccttccggcgtgccagatagattctccggctctaagagcggcacctccgcctctctggccatcacaggcctgcaggcagaggacgaggcagattactattgtcagtcctacgatagatatacccaccccgccctgctgtttggcaccggcacaaaggtgacagtgctg

SEQ ID NO: 158 - DNA, 1686 bp, Artificial Sequence
  CL_ 23513 Full nt
gagccaaagagctccgacaagacccacacatgccccccttgtccggcgccagaggcagcaggaggaccaagcgtgttcctgtttccacccaagcccaaagacaccctgatgattagccgaacccctgaagtcacatgcgtggtcgtgtccgtgtctcacgaggacccagaagtcaagttcaactggtacgtggatggcgtcgaggtgcataatgccaagacaaaaccccgggaggaacagtacaacagcacctatagagtcgtgtccgtcctgacagtgctgcaccaggattggctgaacggcaaggaatataagtgcaaagtgtccaataaggccctgcccgctcctatcgagaaaaccatttctaaggcaaaaggccagcctcgcgagcctcaggtgtacgtgctgccaccttcccgcgacgagctgaccaagaatcaggtgtctctgctgtgcctggtgaagggcttctatccaagcgatatcgcagtggagtgggagtccaacggacagcccgagaacaattacctgacctggccacccgtgctggacagcgatggctccttctttctgtattccaagctgacagtggacaagtctagatggcagcagggcaacgtgttcagctgttccgtgatgcacgaggccctgcacaaccactacacccagaagtctctgagcttaagcccaggaggaggaggaggctctggcggcggcagcggcggcggcagcggaggaggaggcagcggaggaggaggctccggaggcggcggctctggcggcggcggcagcaagatcgacgcctgcaagcgcggcgatgtgacagtgaagcctagccacgtgatcctgctgggctccaccgtgaatatcacatgctctctgaagccacggcagggctgtttccactactcccggagaaacaagctgatcctgtataagttcgacaggcgcatcaactttcaccacggccactctctgaatagccaggtgaccggactgccactgggcaccacactgttcgtgtgcaagctggcctgtatcaatagcgatgagatccagatctgtggagccgagatctttgtgggagtggcccccgagcagcctcagaacctgtcctgcatccagaagggagagcagggaaccgtggcatgtacatgggagcggggcagagacacccacctgtacaccgagtatacactgcagctgagcggccccaagaacctgacatggcagaagcagtgcaaggatatctactgtgactatctggatttcggcatcaacctgaccccagagtcccccgagtctaacttcaccgccaaggtgacagccgtgaactctctgggcagctcctctagcctgcccagcaccttcacatttctggacatcgtgcgccctctgcctccatgggatatccggatcaagtttcagaaggcctccgtgtctagatgcacactgtactggagggacgagggcctggtgctgctgaacaggctgcgctatagacccagcaattccagactgtggaacatggtgaatgtgaccaaggccaagggcaggcacgacctgctggatctgaagcctttcacagagtacgagtttcagatctcctctaagctgcacctgtataagggctcttggagcgattggtccgagtctctgagggcacagacccctgaggaggagcca

SEQ ID NO: 159 - DNA, 2304 bp, Artificial Sequence
  CL_ 23710 Full nt
gagccaaagagctccgacaagacccacacatgccccccttgtccggcgccagaggctgcaggaggaccaagcgtgttcctgtttccacccaagcctaaagacacactgatgatttcccgaacccccgaagtcacatgcgtggtcgtgtctgtgagtcacgaggaccctgaagtcaagttcaactggtacgtggatggcgtcgaggtgcataatgccaagactaaacctagggaggaacagtacaactcaacctatcgcgtcgtgagcgtcctgacagtgctgcaccaggattggctgaacggcaaagaatataagtgcaaagtgagcaataaggccctgcccgctcctatcgagaaaaccatttccaaggctaaagggcagcctcgcgaaccacaggtgtacgtgtatcccccttcccgggacgagctgaccaagaaccaggtgtctctgacatgcctggtgaagggcttctaccccagcgatatcgccgtggagtgggagtccaatggccagcctgagaacaattataagaccacaccacccgtgctggacagcgatggctccttcgccctggtgtccaagctgaccgtggacaagtctaggtggcagcagggcaacgtgttttcttgcagcgtgatgcacgaggccctgcacaatcactacacccagaagtccctgagcttaagcccaggaggctccgccgacggaggaatgagcgggcggagcgccaacgccgggagcgcagacggcggcatctgggagctgaagaaggacgtgtacgtggtggagctggactggtacccggatgcaccaggagagatggtggtgctgacctgcgacacacctgaggaggatggcatcacctggacactggaccagagctccgaggtgctgggcagcggcaagaccctgacaatccaggtgaaggagttcggcgatgccggacagtacacatgtcacaagggcggcgaggtgctgtctcacagcctgctgctgctgcacaagaaggaggatggcatctggtctacagacatcctgaaggatcagaaggagcctaagaacaagaccttcctgaggtgcgaggccaagaattatagcggcagattcacctgttggtggctgaccacaatctccaccgacctgacattttctgtgaagtctagccggggctcctctgatccacagggagtgacatgcggagccgccaccctgtccgccgagcgggtgagaggcgacaacaaggagtacgagtattctgtggagtgccaggaggatagcgcctgtcccgccgccgaggagtctctgcctatcgaagtgatggtggacgccgtgcacaagctgaagtacgagaattatacaagctccttctttatccgggacatcatcaagccagatccccctaagaacctgcagctgaagcccctgaagaatagcagacaggtggaggtgtcctgggagtaccctgatacctggtccacaccacactcttatttcagcctgaccttttgcgtgcaggtgcagggcaagagcaagagggagaagaaggaccgcgtgttcaccgataagacatccgccaccgtgatctgtcggaagaacgccagcatctctgtgagagcccaggaccggtactattctagctcctggagcgagtgggcctccgtgccttgttctggaggaggaggcagcggcggaggaggctccggaggaggaggctctaatctgccagtggccaccccagaccccggaatgttcccatgcctgcaccactcccagaacctgctgcgggccgtgtctaatatgctgcagaaggccagacagacactggagttttacccttgtacctctgaggagatcgaccacgaggatatcacaaaggataagaccagcacagtggaggcctgcctgccactggagctgaccaagaacgagagctgtctgaacagccgggagaccagcttcatcaccaacggcagctgcctggcctccagaaagacatcttttatgatggccctgtgcctgagcagcatctacgaggacctgaagatgtatcaggtggagttcaagaccatgaacgccaagctgctgatggaccccaagcggcagatctttctggatcagaatatgctggccgtgatcgacgagctgatgcaggccctgaactttaatagcgagacagtgcctcagaagtcctctctggaggagccagatttctacaagaccaagatcaagctgtgcatcctgctgcacgccttccggatcagagccgtgaccatcgacagagtgatgagctacctgaacgccagc

SEQ ID NO: 160 - DNA, 2304 bp, Artificial Sequence
  CL_ 23711 Full nt
gagccaaagagctccgacaagacccacacatgccccccttgtccggcgccagaggctgcaggaggaccaagcgtgttcctgtttccacccaagcctaaagacacactgatgatttcccgaacccccgaagtcacatgcgtggtcgtgtctgtgagtcacgaggaccctgaagtcaagttcaactggtacgtggatggcgtcgaggtgcataatgccaagactaaacctagggaggaacagtacaactcaacctatcgcgtcgtgagcgtcctgacagtgctgcaccaggattggctgaacggcaaagaatataagtgcaaagtgagcaataaggccctgcccgctcctatcgagaaaaccatttccaaggctaaagggcagcctcgcgaaccacaggtgtacgtgtatcccccttcccgggacgagctgaccaagaaccaggtgtctctgacatgcctggtgaagggcttctaccccagcgatatcgccgtggagtgggagtccaatggccagcctgagaacaattataagaccacaccacccgtgctggacagcgatggctccttcgccctggtgtccaagctgaccgtggacaagtctaggtggcagcagggcaacgtgttttcttgcagcgtgatgcacgaggccctgcacaatcactacacccagaagtccctgagcttaagccccggcggctctgccgacggaggaatgagcgggcggagcgccaacgccgggagcgcagacggcggcatctgggagctgaagaaggacgtgtacgtggtggagctggattggtacccggatgccccaggcgagatggtggtgctgacctgcgacacacccgaggaggatggcatcacctggacactggatcagagctccgaggtgctgggctccggcaagaccctgacaatccaggtgaaggagttcggcgacgccggacagtacacatgtcacaagggaggagaggtgctgagccactccctgctgctgctgcacaagaaggaggacggcatctggtccacagacatcctgaaggatcagaaggagcccaagaacaagaccttcctgaggtgcgaggccaagaattatagcggcagattcacctgttggtggctgaccacaatctccaccgatctgacattttctgtgaagtctagccggggctcctctgaccctcagggagtgacatgcggagccgccaccctgtccgccgagcgggtgagaggcgataacaaggagtacgagtattctgtggagtgccaggaggacagcgcctgtccagccgccgaggagagcctgccaatcgaagtgatggtggatgccgtgcacaagctgaagtacgagaattatacaagctccttctttatcagggacatcatcaagcccgatccccctaagaacctgcagctgaagcctctgaagaatagccgccaggtggaggtgtcctgggagtaccccgacacctggagcacacctcactcctatttctctctgaccttttgcgtgcaggtgcagggcgagagcaagcaggagaagaaggacagggtgttcaccgataagacatccgccaccgtgatctgtcgcaagaacgcctctatcagcgtgcgggcacaggaccggtactattctagctcctggagcgagtgggcctccgtgccttgttctggaggaggaggcagcggcggaggaggctccggaggaggaggctctaatctgccagtggccaccccagaccccggaatgttcccatgcctgcaccactcccagaacctgctgcgggccgtgtctaatatgctgcagaaggccagacagacactggagttttacccttgtacctctgaggagatcgaccacgaggatatcacaaaggataagaccagcacagtggaggcctgcctgccactggagctgaccaagaacgagagctgtctgaacagccgggagaccagcttcatcaccaacggcagctgcctggcctccagaaagacatcttttatgatggccctgtgcctgagcagcatctacgaggacctgaagatgtatcaggtggagttcaagaccatgaacgccaagctgctgatggaccccaagcggcagatctttctggatcagaatatgctggccgtgatcgacgagctgatgcaggccctgaactttaatagcgagacagtgcctcagaagtcctctctggaggagccagatttctacaagaccaagatcaagctgtgcatcctgctgcacgccttccggatcagagccgtgaccatcgacagagtgatgagctacctgaacgccagc

SEQ ID NO: 161 - DNA, 3096 bp, Artificial Sequence
  CL_ 24228 Full nt
gagccaaagagctccgacaagacccacacatgccccccttgtccggcgccagaggctgcaggaggaccaagcgtgttcctgtttccacccaagcctaaagacacactgatgatttcccgaacccccgaagtcacatgcgtggtcgtgtctgtgagtcacgaggaccctgaagtcaagttcaactggtacgtggatggcgtcgaggtgcataatgccaagactaaacctagggaggaacagtacaactcaacctatcgcgtcgtgagcgtcctgacagtgctgcaccaggattggctgaacggcaaagaatataagtgcaaagtgagcaataaggccctgcccgctcctatcgagaaaaccatttccaaggctaaagggcagcctcgcgaaccacaggtgtacgtgtatcccccttcccgggacgagctgaccaagaaccaggtgtctctgacatgcctggtgaagggcttctaccccagcgatatcgccgtggagtgggagtccaatggccagcctgagaacaattataagaccacaccacccgtgctggacagcgatggctccttcgccctggtgtccaagctgaccgtggacaagtctaggtggcagcagggcaacgtgttttcttgcagcgtgatgcacgaggccctgcacaatcactacacccagaagtccctgagcttaagcccaggaggcagcgccgatggaggaatctgggagctgaagaaggacgtgtacgtggtggagctggactggtacccggatgccccaggcgagatggtggtgctgacctgcgacacacctgaggaggatggcatcacctggacactggatcagagctccgaggtgctgggctccggcaagaccctgacaatccaggtgaaggagttcggcgacgccggacagtacacatgtcacaagggaggagaggtgctgagccactccctgctgctgctgcacaagaaggaggacggcatctggagcacagacatcctgaaggatcagaaggagccaaagaacaagaccttcctgcggtgcgaggccaagaattatagcggcagattcacctgttggtggctgaccacaatcagcaccgatctgacattttccgtgaagtctagcaggggctcctctgacccccagggagtgacatgcggagccgccaccctgagcgccgagcgggtgagaggcgataacaaggagtacgagtattccgtggagtgccaggaggactctgcctgtccagccgccgaggagtccctgccaatcgaagtgatggtggatgccgtgcacaagctgaagtacgagaattatacaagctccttctttatcagggacatcatcaagcccgatccccctaagaacctgcagctgaagcccctgaagaacagcagacaggtggaggtgagctgggagtaccccgacacctggagcacacctcactcctatttctctctgaccttttgcgtgcaggtgcagggcaagtctaagagggagaagaaggaccgcgtgttcaccgataagacaagcgccaccgtgatctgtagaaagaacgcctctatcagcgtgcgggcacaggaccggtactacagctcctcttggagcgagtgggcctccgtgccctgctctggcggcggcggctctggaggaggaggcagcggcggaggaggctccaacctgcctgtggccacccccgatcctggcatgttcccatgcctgcaccactctcagaacctgctgagggccgtgtccaatatgctgcagaaggcccgccagacactggagttttatccctgtaccagcgaggagatcgaccacgaggatatcacaaaggacaagacctccacagtggaggcctgcctgcctctggagctgaccaagaacgagagctgtctgaacagccgggagaccagcttcatcaccaatggcagctgcctggcctccagaaagacatcttttatgatggccctgtgcctgagctccatctacgaggatctgaagatgtatcaggtggagttcaagaccatgaacgccaagctgctgatggaccctaagcggcagatctttctggatcagaatatgctggccgtgatcgacgagctgatgcaggccctgaacttcaatagcgagacagtgccccagaagtctagcctggaggagcctgatttctacaagaccaagatcaagctgtgcatcctgctgcacgcctttcggatcagagccgtgaccatcgacagagtgatgtcttatctgaacgccagcggcggcggaggctctatgagcgggcggagcgccaacgcagggggaggaggctccggaggaggaggctctggcggcggcggcagcggaggcggcggctccgagatcgtgatgacacagagccctgccaccctgtccgtgtctccaggagagagggccacactgtcctgtagagccagccagtccatctctatcaacctgcactggtatcagcagaagccaggccaggcccccaggctgctgatctatttcgccagccagagcatttctggcatccctgcacgcttcagcggctccggctctggcaccgagtttaccctgacaatctcctctctgcagagcgaggattttgccgtgtactattgccagcagagcaattccttcccactgacatttggcggcggcaccaaggtggagatcaagggaggcagcggcggcggctccggcggcggctctgggggaggcagcggaggaggctccggacaggtgcagctggtgcagtccggagccgaggtgaagaagccaggggccagcgtgaaggtgagctgtaaggcctccggctacaccttcacagactactatctgcactgggtgaggcaggcccccggacagggactggagtggatgggctggatcgacccagagaacggcgatacagagtacgcccccaagtttcagggccgcgtgaccatgaccacagatacctctacaagcaccgcctatatggagctgaggtccctgcgctctgacgataccgccgtgtactattgtaacgccaataaggagctgaggtactttgacgtgtggggccagggcacaatggtgaccgtgagctcc

SEQ ID NO: 162 - DNA, 2373 bp, Artificial Sequence
  CL_ 24229 Full nt
gagccaaagagctccgacaagacccacacatgccccccttgtccggcgccagaggcagcaggaggaccaagcgtgttcctgtttccacccaagcccaaagacaccctgatgattagccgaacccctgaagtcacatgcgtggtcgtgtccgtgtctcacgaggacccagaagtcaagttcaactggtacgtggatggcgtcgaggtgcataatgccaagacaaaaccccgggaggaacagtacaacagcacctatagagtcgtgtccgtcctgacagtgctgcaccaggattggctgaacggcaaggaatataagtgcaaagtgtccaataaggccctgcccgctcctatcgagaaaaccatttctaaggcaaaaggccagcctcgcgagcctcaggtgtacgtgctgccaccttcccgcgacgagctgaccaagaatcaggtgtctctgctgtgcctggtgaagggcttctatccaagcgatatcgcagtggagtgggagtccaacggacagcccgagaacaattacctgacctggccacccgtgctggacagcgatggctccttctttctgtattccaagctgacagtggacaagtctagatggcagcagggcaacgtgttcagctgttccgtgatgcacgaggccctgcacaaccactacacccagaagtctctgagcttaagcccaggaggaggaggaggctctggaggaggaggctctatgagcgggcggagcgccaacgcagggggaggaggcagcgggggaggaggctcccaggtgcagctggtggagagcggcggcggcgtggtgcagcccggcagaagcctgcggctgagctgcgcagcctccggcttcacctttagctcctacggcatgcactgggtgcggcaggcccctggcaagggactggagtgggtggccttcatcagatatgacggctccaataagtactatgccgattctgtgaagggccggtttacaatctctagagacaacagcaagaataccctgtacctgcagatgaacagcctgcgggccgaggacacagccgtgtactattgcaagacccacggctcccacgataattggggccagggcacaatggtgaccgtgtcttccggcggcggcggctccatgagcgggcggagcgccaacgcagggggtggaggctccggaggaggaggcagccagtccgtgctgacacagccaccttctgtgagcggagcccccggacagagggtgaccatctcctgttctggcagccgctccaacatcggcagcaatacagtgaagtggtatcagcagctgccaggcaccgcccccaagctgctgatctactataatgaccagcggccttccggcgtgccagatagattctctggcagcaagtccggcacatctgccagcctggccatcaccggcctgcaggcagaggacgaggccgattactattgccagagctacgataggtatacacaccctgccctgctgtttggcaccggcacaaaggtgaccgtgctgggcggcggcggctctggcggcggcggcagcggcggaggaggctccatgagcgggcggagcgccaacgcagggggcggcggctccggaggagggggctctggaggcggcggcagcgagatcgtgatgacacagtccccagccaccctgagcgtgtccccaggagagagggccacactgtcttgtcgcgcctctcagagcatctccatcaatctgcactggtatcagcagaagccaggccaggccccccggctgctgatctatttcgcctctcagtccatttccggcatccctgcacgcttctctggcagcggctccggcaccgagtttaccctgacaatctcctctctgcagagcgaggactttgccgtgtactattgccagcagtctaacagcttcccactgacatttggcggcggcaccaaggtggagatcaagggcggctccggcggcggctctgggggcggcagcggaggaggctccggaggaggctctggacaggtgcagctggtgcagtccggagccgaggtgaagaagccaggggccagcgtgaaggtgtcctgtaaggcctctggctacaccttcacagattactatctgcattgggtgcggcaggcccccggacagggactggagtggatgggctggatcgaccctgagaatggcgatacagagtacgccccaaagtttcagggcagagtgaccatgaccacagacacctccacatctaccgcctatatggagctgaggagcctgcgctccgacgataccgccgtgtactattgtaacgccaataaggagctgcggtatttcgacgtgtggggacagggcacaatggtcaccgtgagctcc

SEQ ID NO: 163 - DNA, 2373 bp, Artificial Sequence
  CL_ 24230 Full nt
gagccaaagagctccgacaagacccacacatgccccccttgtccggcgccagaggcagcaggaggaccaagcgtgttcctgtttccacccaagcccaaagacaccctgatgattagccgaacccctgaagtcacatgcgtggtcgtgtccgtgtctcacgaggacccagaagtcaagttcaactggtacgtggatggcgtcgaggtgcataatgccaagacaaaaccccgggaggaacagtacaacagcacctatagagtcgtgtccgtcctgacagtgctgcaccaggattggctgaacggcaaggaatataagtgcaaagtgtccaataaggccctgcccgctcctatcgagaaaaccatttctaaggcaaaaggccagcctcgcgagcctcaggtgtacgtgctgccaccttcccgcgacgagctgaccaagaatcaggtgtctctgctgtgcctggtgaagggcttctatccaagcgatatcgcagtggagtgggagtccaacggacagcccgagaacaattacctgacctggccacccgtgctggacagcgatggctccttctttctgtattccaagctgacagtggacaagtctagatggcagcagggcaacgtgttcagctgttccgtgatgcacgaggccctgcacaaccactacacccagaagtctctgagcttaagcccaggaggaggaggaggctctggaggaggaggctctatgagcgggcggagcgccaacgcagggggaggaggcagcgggggaggaggctcccaggtgcagctggtggagagcggcggcggcgtggtgcagcccggcagaagcctgcggctgagctgtgcagcctccggcttcacctttagctcctacggcatgcactgggtgcggcaggcccctggcaagggactggagtgggtggccttcatcagatatgacggctccaataagtactatgccgattctgtgaagggccggtttacaatctctagagacaacagcaagaataccctgtacctgcagatgaacagcctgcgggccgaggacacagccgtgtactattgcaagacccacggctcccacgataattggggccagggcacaatggtgaccgtgtcttccggcggcggcggctccatgagcgggcggagcgccaacgcagggggtggaggctccggaggaggaggcagccagtccgtgctgacacagccaccttctgtgagcggagcccccggacagagggtgaccatctcctgttctggcagccgctccaacatcggcagcaatacagtgaagtggtatcagcagctgccaggcaccgcccccaagctgctgatctactataatgaccagcggccttccggcgtgccagatagattctctggcagcaagtccggcacatctgccagcctggccatcaccggcctgcaggcagaggacgaggccgattactattgtcagtcctacgacaggtatacacaccctgccctgctgtttggcaccggcacaaaggtgaccgtgctgggcggcggcggctctggcggcggcggcagcggcggaggaggctccatgagcgggcggagcgccaacgcagggggcggcggctccggaggagggggctctggaggcggcggcagccaggtgcagctggtgcagtccggagccgaggtgaagaagccaggggccagcgtgaaggtgtcttgcaaggccagcggctacaccttcacagattactatctgcattgggtgcggcaggcccccggacagggactggagtggatgggctggatcgaccctgagaatggcgatacagagtacgccccaaagtttcagggcagagtgaccatgaccacagacaccagcacatccaccgcctatatggagctgaggagcctgcgctccgacgataccgccgtgtactattgcaacgccaataaggagctgcggtatttcgacgtgtggggacagggcacaatggtcaccgtgtcctctggcggctccggcggcggctctgggggcggcagcggaggaggctccggaggaggctctggcgagatcgtgatgacacagtccccagccaccctgtctgtgagcccaggagagagggccacactgtcttgtcgcgcctcccagtctatcagcatcaacctgcactggtatcagcagaagccaggccaggccccccggctgctgatctatttcgcctcccagtccattagcggcatccctgcacgcttctccggctctggcagcggcaccgagtttacactgaccatcagctccctgcagagcgaggattttgccgtgtactattgccagcagtccaattctttcccactgacatttggcggcggcaccaaggtggagatcaag

SEQ ID NO: 164 - DNA, 3270 bp, Artificial Sequence
  CL_ 24231 Full nt
gagccaaagagctccgacaagacccacacatgccccccttgtccggcgccagaggctgcaggaggaccaagcgtgttcctgtttccacccaagcctaaagacacactgatgatttcccgaacccccgaagtcacatgcgtggtcgtgtctgtgagtcacgaggaccctgaagtcaagttcaactggtacgtggatggcgtcgaggtgcataatgccaagactaaacctagggaggaacagtacaactcaacctatcgcgtcgtgagcgtcctgacagtgctgcaccaggattggctgaacggcaaagaatataagtgcaaagtgagcaataaggccctgcccgctcctatcgagaaaaccatttccaaggctaaagggcagcctcgcgaaccacaggtgtacgtgtatcccccttcccgggacgagctgaccaagaaccaggtgtctctgacatgcctggtgaagggcttctaccccagcgatatcgccgtggagtgggagtccaatggccagcctgagaacaattataagaccacaccacccgtgctggacagcgatggctccttcgccctggtgtccaagctgaccgtggacaagtctaggtggcagcagggcaacgtgttttcttgcagcgtgatgcacgaggccctgcacaatcactacacccagaagtccctgagcttaagcccaggaggcagcgccgatggaggaatctgggagctgaagaaggacgtgtacgtggtggagctggactggtacccggatgccccaggcgagatggtggtgctgacctgcgacacacctgaggaggatggcatcacctggacactggatcagagctccgaggtgctgggctccggcaagaccctgacaatccaggtgaaggagttcggcgacgccggacagtacacatgtcacaagggaggagaggtgctgagccactccctgctgctgctgcacaagaaggaggacggcatctggagcacagacatcctgaaggatcagaaggagccaaagaacaagaccttcctgcggtgcgaggccaagaattatagcggcagattcacctgttggtggctgaccacaatcagcaccgatctgacattttccgtgaagtctagcaggggctcctctgacccccagggagtgacatgcggagccgccaccctgagcgccgagcgggtgagaggcgataacaaggagtacgagtattccgtggagtgccaggaggactctgcctgtccagccgccgaggagtccctgccaatcgaagtgatggtggatgccgtgcacaagctgaagtacgagaattatacaagctccttctttatcagggacatcatcaagcccgatccccctaagaacctgcagctgaagcccctgaagaacagcagacaggtggaggtgagctgggagtaccccgacacctggagcacacctcactcctatttctctctgaccttttgcgtgcaggtgcagggcaagtctaagagggagaagaaggaccgcgtgttcaccgataagacaagcgccaccgtgatctgtagaaagaacgcctctatcagcgtgcgggcacaggaccggtactacagctcctcttggagcgagtgggcctccgtgccctgctctggaggaggaggcagcggcggaggaggctccggaggcggcggctctaatctgcccgtggccaccccagatcccggaatgttcccttgcctgcaccactcccagaacctgctgcgcgccgtgtctaatatgctgcagaaggcccggcagaccctggagttttacccctgtacatctgaggagatcgaccacgaggatatcaccaaggacaagaccagcacagtggaggcctgcctgcctctggagctgacaaagaacgagagctgtctgaacagccgggagaccagcttcatcacaaacggcagctgcctggcctcccggaagacctcttttatgatggccctgtgcctgagctccatctacgaggatctgaagatgtatcaggtggagttcaagacaatgaacgccaagctgctgatggaccctaagagacagatctttctggatcagaacatgctggccgtgatcgacgagctgatgcaggccctgaacttcaattccgagaccgtgcctcagaagtctagcctggaggagccagatttctacaagacaaagatcaagctgtgcatcctgctgcacgcctttcggatcagagccgtgaccatcgacagagtgatgagctacctgaacgccagcggcggcggcggctccatgagcgggcggagcgccaacgcagggggaggcggctctggcggcggcggcagcggcggcgggggctccggaggaggaggctctggaggcggcggcagcaagatcgacgcctgtaagcgcggcgatgtgaccgtgaagccttcccacgtgatcctgctgggctctaccgtgaatatcacatgcagcctgaagccacggcagggctgttttcactactcccggagaaacaagctgatcctgtataagttcgataggcgcatcaactttcaccacggccactctctgaatagccaggtgacaggcctgcctctgggcaccacactgttcgtgtgcaagctggcctgtatcaattccgacgagatccagatctgcggagccgagatctttgtgggcgtggcccctgagcagccacagaacctgagctgcatccagaagggagagcagggcaccgtggcatgtacatgggagaggggccgcgatacccacctgtacaccgagtatacactgcagctgagcggcccaaagaacctgacatggcagaagcagtgcaaggacatctactgtgactatctggatttcggcatcaacctgacccccgagtcccctgagtctaacttcaccgccaaggtgacagccgtgaacagcctgggctcctctagctccctgccatccaccttcacatttctggatatcgtgagacccctgcccccttgggacatcaggatcaagttccagaaggccagcgtgtcccgctgtacactgtactggcgggatgagggcctggtgctgctgaaccggctgagatataggccatctaatagcagactgtggaacatggtgaatgtgaccaaggccaagggcaggcacgacctgctggatctgaagcccttcacagagtacgagtttcagatctctagcaagctgcacctgtataagggctcctggtctgactggagcgagtccctgagggcacagaccccagaggaggagcca

SEQ ID NO: 165 - DNA, 1458 bp, Artificial Sequence
  CL_ 24232 Full nt
gagccaaagagctccgacaagacccacacatgccccccttgtccggcgccagaggcagcaggaggaccaagcgtgttcctgtttccacccaagcccaaagacaccctgatgattagccgaacccctgaagtcacatgcgtggtcgtgtccgtgtctcacgaggacccagaagtcaagttcaactggtacgtggatggcgtcgaggtgcataatgccaagacaaaaccccgggaggaacagtacaacagcacctatagagtcgtgtccgtcctgacagtgctgcaccaggattggctgaacggcaaggaatataagtgcaaagtgtccaataaggccctgcccgctcctatcgagaaaaccatttctaaggcaaaaggccagcctcgcgagcctcaggtgtacgtgctgccaccttcccgcgacgagctgaccaagaatcaggtgtctctgctgtgcctggtgaagggcttctatccaagcgatatcgcagtggagtgggagtccaacggacagcccgagaacaattacctgacctggccacccgtgctggacagcgatggctccttctttctgtattccaagctgacagtggacaagtctagatggcagcagggcaacgtgttcagctgttccgtgatgcacgaggccctgcacaaccactacacccagaagtctctgagcttaagcccaggaggaggaggaggctctggaggaggaggcagcggaggcggcggctccatgagcgggcggagcgccaacgcagggggcggcggctccggcggcggcggctctggcggcggcggcagctgccgcacctccgagtgctgtttccaggaccccccttaccctgatgcagacagcggctccgcctctggaccaagagatctgaggtgctatcgcatcagctccgacaggtacgagtgtagctggcagtatgagggacctaccgccggggtgagccactttctgcggtgctgtctgtctagcggcagatgctgttacttcgccgccgggagcgccacaaggctgcagtttagcgaccaggccggggtgagcgtgctgtataccgtgacactgtgggtggagtcctgggccagaaaccagaccgagaagtctcctgaggtgacactgcagctgtacaattctgtgaagtatgagccacccctgggcgatatcaaggtgagcaagctggccgggcagctgaggatggagtgggagaccccagacaatcaagtgggagccgaggtgcagttccgccacaggacaccatcctctccatggaagctgggcgattgcggaccacaggacgatgacacagagtcctgcctgtgccctctggagatgaacgtggcccaggagtttcagctgcggagaaggcagctgggctctcagggcagctcctggagcaagtggtctagccccgtgtgcgtgcctccagagaatccccctcagccccag

SEQ ID NO: 166 - DNA, 1860 bp, Artificial Sequence
  CL_ 24233 Full nt
gagccaaagagctccgacaagacccacacatgccccccttgtccggcgccagaggcagcaggaggaccaagcgtgttcctgtttccacccaagcccaaagacaccctgatgattagccgaacccctgaagtcacatgcgtggtcgtgtccgtgtctcacgaggacccagaagtcaagttcaactggtacgtggatggcgtcgaggtgcataatgccaagacaaaaccccgggaggaacagtacaacagcacctatagagtcgtgtccgtcctgacagtgctgcaccaggattggctgaacggcaaggaatataagtgcaaagtgtccaataaggccctgcccgctcctatcgagaaaaccatttctaaggcaaaaggccagcctcgcgagcctcaggtgtacgtgctgccaccttcccgcgacgagctgaccaagaatcaggtgtctctgctgtgcctggtgaagggcttctatccaagcgatatcgcagtggagtgggagtccaacggacagcccgagaacaattacctgacctggccacccgtgctggacagcgatggctccttctttctgtattccaagctgacagtggacaagtctagatggcagcagggcaacgtgttcagctgttccgtgatgcacgaggccctgcacaaccactacacccagaagtctctgagcttaagccctggaggaggcggcggctccatgagcgggcggagcgccaacgcagggggaggaggcagcggcggaggaggctccggcggcggcggctctggaggaggaggcagcaagatcgatgcatgcaagaggggcgacgtgaccgtgaagcctagccacgtgatcctgctgggctccaccgtgaacatcacatgctctctgaagccacgccagggctgtttccactactcccggagaaataagctgatcctgtataagttcgataggcgcatcaactttcaccacggccactctctgaatagccaggtgacaggcctgcccctgggcaccacactgttcgtgtgcaagctggcctgtatcaacagcgacgagatccagatctgcggagccgagatctttgtgggcgtggcccctggaggaggaggctccggaggaggcggctctggcggcggcggcagcatgagcgggcggagcgccaacgcagggggtggcggcagcggcggcggcggctccggagggggcggctcctgtcgcacctctgagtgctgtttccaggaccccccttaccctgatgcagactctggcagcgcctccggaccaagagatctgaggtgctatcgcatcagctccgacagatacgagtgttcttggcagtatgagggaccaaccgccggggtgagccactttctgcggtgctgtctgtctagcggcagatgctgttacttcgccgccgggagcgccacaaggctgcagttttctgaccaggccggggtgagcgtgctgtataccgtgacactgtgggtggagagctgggccagaaaccagaccgagaagtccccagaggtgacactgcagctgtacaattccgtgaagtatgagccacccctgggcgatatcaaggtgtctaagctggccgggcagctgaggatggagtgggagacccccgacaatcaagtgggagccgaggtgcagttccgccacaggacaccatcctctccatggaagctgggcgattgcggaccacaggacgatgacaccgagtcctgcctgtgccctctggagatgaacgtggcccaggagtttcagctgcggagaaggcagctgggctcccagggcagctcctggtctaagtggtctagccccgtgtgcgtgcctccagagaatccccctcagccccag

SEQ ID NO: 167 - DNA, 1686 bp, Artificial Sequence
  CL_ 24235 Full nt
aagatcgacgcatgcaagaggggcgatgtgacagtgaagccttctcacgtgatcctgctgggcagcaccgtgaacatcacatgctccctgaagcccagacagggctgttttcactactcccggagaaataagctgatcctgtataagttcgataggcgcatcaactttcaccacggccactctctgaatagccaggtgaccggactgcctctgggcaccacactgttcgtgtgcaagctggcctgtatcaactctgacgagatccagatctgtggagccgagatctttgtgggcgtggccccaggaggaggaggcagcggaggaggcggcagcatgagcggcagaagcgccaacgccggaggaggaggcagcagaaatctgccagtggccacaccagaccccggaatgttcccttgcctgcaccactcccagaacctgctgagggccgtgtctaatatgctgcagaaggcccgccagaccctggagttttacccatgtacaagcgaggagatcgaccacgaggatatcaccaaggataagacctccacagtggaggcatgcctgccactggagctgacaaagaacgagtcctgtctgaacagccgggagaccagcttcatcacaaacggctcctgcctggcctctagaaagaccagctttatgatggccctgtgcctgagctccatctacgaggacctgaagatgtatcaggtggagttcaagacaatgaacgccaagctgctgatggaccccaagcggcagatctttctggatcagaatatgctggccgtgatcgacgagctgatgcaggccctgaacttcaatagcgagaccgtgcctcagaagtctagcctggaggagccagatttctacaagacaaagatcaagctgtgcatcctgctgcacgcctttcggatcagagccgtgaccatcgacagagtgatgtcctacctgaacgccagcggcggcggcggcagcggcggaggcggctccgagcctaagtcctctgataagacccacacatgccccccttgtccggcgccagaggctgcaggaggaccaagcgtgttcctgtttccacccaagcctaaagacacactgatgatttcccgaacccccgaagtcacatgcgtggtcgtgtctgtgagtcacgaggaccctgaagtcaagttcaactggtacgtggatggcgtcgaggtgcataatgccaagactaaacctagggaggaacagtacaactcaacctatcgcgtcgtgagcgtcctgacagtgctgcaccaggattggctgaacggcaaagaatataagtgcaaagtgagcaataaggccctgcccgctcctatcgagaaaaccatttccaaggctaaagggcagcctcgcgaaccacaggtctacgtgtatcctccaagccgggacgagctgacaaagaaccaggtctccctgacttgtctggtgaaagggttttaccctagtgatatcgctgtggagtgggaatcaaatggacagccagagaacaattataagactaccccccctgtgctggacagtgatgggtcattcgcactggtctccaagctgacagtggacaaatctcggtggcagcagggaaatgtcttttcatgtagcgtgatgcatgaagcactgcacaaccattacacccagaagtcactgtcactgtcaccagga

SEQ ID NO: 168 - DNA, 1428 bp, Artificial Sequence
  CL_ 24236 Full nt
tgcaggacaagcgagtgctgttttcaggaccccccttacccagatgcagacagcggctccgcctctggaccccgggacctgcggtgctatagaatcagctccgaccgctacgagtgttcttggcagtatgagggacctaccgccggggtgagccacttcctgaggtgctgtctgtctagcggcagatgctgttacttcgccgccgggagcgccacaaggctgcagttttctgaccaggccggggtgagcgtgctgtataccgtgacactgtgggtggagagctgggccagaaaccagaccgagaagtccccagaggtgacactgcagctgtacaattccgtgaagtatgagccacccctgggcgatatcaaggtgtctaagctggccgggcagctgaggatggagtgggagacccccgacaatcaagtgggagccgaggtgcagttccgccacaggacaccttcctctccatggaagctgggcgattgcggcccacaggacgatgacaccgagagctgcctgtgccccctggagatgaacgtggcccaggagtttcagctgcggagaaggcagctgggctcccagggcagctcctggtctaagtggtctagccccgtgtgcgtgcctccagagaatccccctcagccacagggcggcggcggctctggaggaggaggcagcggcggaggaggctccggaggcggcggcagcatgtccggcaggtccgccaacgccgagcccaagtcctctgacaagacccacacatgcccaccctgtccggcgccagaggccgccggaggaccaagcgtgttcctgtttccacccaagcccaaggacaccctgatgatctcccggaccccagaggtgacatgcgtggtggtgagcgtgtcccacgaggaccccgaggtgaagtttaactggtacgtggatggcgtggaggtgcacaatgccaagacaaagccccgggaggagcagtacaattctacctatagagtggtgagcgtgctgacagtgctgcaccaggattggctgaacggcaaggagtataagtgtaaggtgagcaataaggccctgccagcccccatcgagaagaccatctccaaggccaagggccagcctcgcgaaccacaggtctacgtgctgccccctagccgcgacgaactgactaaaaatcaggtctctctgctgtgtctggtcaaaggattctacccttccgacatcgccgtggagtgggaaagtaacggccagcccgagaacaattacctgacctggccccctgtgctggactctgatgggagtttctttctgtattcaaagctgacagtcgataaaagccggtggcagcagggcaatgtgttcagctgctccgtcatgcacgaagcactgcacaaccattacactcagaagtccctgtccctgtcacctggc

SEQ ID NO: 169 - DNA, 1755 bp, Artificial Sequence
  CL_ 24246 Full nt
gagccaaagagctccgacaagacccacacatgccccccttgtccggcgccagaggctgcaggaggaccaagcgtgttcctgtttccacccaagcctaaagacacactgatgatttcccgaacccccgaagtcacatgcgtggtcgtgtctgtgagtcacgaggaccctgaagtcaagttcaactggtacgtggatggcgtcgaggtgcataatgccaagactaaacctagggaggaacagtacaactcaacctatcgcgtcgtgagcgtcctgacagtgctgcaccaggattggctgaacggcaaagaatataagtgcaaagtgagcaataaggccctgcccgctcctatcgagaaaaccatttccaaggctaaagggcagcctcgcgaaccacaggtgtacgtgtatcccccttcccgggacgagctgaccaagaaccaggtgtctctgacatgcctggtgaagggcttctaccccagcgatatcgccgtggagtgggagtccaatggccagcctgagaacaattataagaccacaccacccgtgctggacagcgatggctccttcgccctggtgtccaagctgaccgtggacaagtctaggtggcagcagggcaacgtgttttcttgcagcgtgatgcacgaggccctgcacaatcactacacccagaagtccctgagcttaagccctggcggcggcggcggctccatgagcgggcggagcgccaacgcagggggaggaggctccggcggaggaggctctggcggcggcggcagcggaggaggcggctccaagatcgacgcctgcaagcggggcgatgtgaccgtgaagccctcccacgtgatcctgctgggctctaccgtgaacatcacatgcagcctgaagcctagacagggctgtttccactacagccggagaaataagctgatcctgtataagttcgataggcgcatcaactttcaccacggccactctctgaatagccaggtgacaggcctgcctctgggcaccacactgttcgtgtgcaagctggcctgtatcaattccgacgagatccagatctgtggagccgagatctttgtgggcgtggccccaggaggaggaggctctggaggaggcggcagcatgagcgggcggagcgccaacgcagggggtggaggctctcgcaatctgcctgtggccacccccgatcctggcatgttcccatgcctgcaccacagccagaacctgctgcgggccgtgtccaatatgctgcagaaggccagacagaccctggagttttacccatgtacatctgaggagatcgaccacgaggatatcaccaaggacaagaccagcacagtggaggcatgcctgccactggagctgacaaagaacgagtcctgtctgaacagccgggagaccagcttcatcacaaacggctcctgcctggcctctcgcaagaccagctttatgatggccctgtgcctgagctccatctacgaggatctgaagatgtatcaggtggagttcaagacaatgaacgccaagctgctgatggaccctaagaggcagatctttctggatcagaatatgctggccgtgatcgacgagctgatgcaggccctgaactttaattccgagaccgtgccacagaagtctagcctggaggagcccgatttctacaagacaaagatcaagctgtgcatcctgctgcacgcctttcggatcagagccgtgaccatcgaccgcgtgatgtcttacctgaacgccagc

SEQ ID NO: 170 - protein, 8 aa, Artificial Sequence
  Protease cleavage sequence
LSGRSDDH

SEQ ID NO: 171 - protein, 13 aa, Artificial Sequence
  Protease cleavage sequence
ISSGLLSGRSDNH

SEQ ID NO: 172 - protein, 13 aa, Artificial Sequence
  Protease cleavage sequence
ISSGLLSGRSDQH

SEQ ID NO: 173 - protein, 13 aa, Artificial Sequence
  Protease cleavage sequence
ISSGLLSGRSDDH

SEQ ID NO: 174 - protein, 8 aa, Artificial Sequence
  Protease cleavage sequence
LSGRSGNH

SEQ ID NO: 175 - protein, 12 aa, Artificial Sequence
  Protease cleavage sequence
TSTSGRSANPRG

SEQ ID NO: 176 - protein, 8 aa, Artificial Sequence
  Protease cleavage sequence
ISSGLLSS

SEQ ID NO: 177 - protein, 8 aa, Artificial Sequence
  Protease cleavage sequence
QNQALRMA

SEQ ID NO: 178 - protein, 10 aa, Artificial Sequence
  Protease cleavage sequence
VHMPLGFLGP

SEQ ID NO: 179 - protein, 8 aa, Artificial Sequence
  Protease cleavage sequence
AVGLLAPP

SEQ ID NO: 180 - protein, 8 aa, Artificial Sequence
  Protease cleavage sequence
LSGRSDDH

SEQ ID NO: 181 - protein, 8 aa, Artificial Sequence
  Protease cleavage sequence
LSGRSDIH

SEQ ID NO: 182 - protein, 8 aa, Artificial Sequence
  Protease cleavage sequence
LSGRSDQH

SEQ ID NO: 183 - protein, 8 aa, Artificial Sequence
  Protease cleavage sequence
LSGRSDTH

SEQ ID NO: 184 - protein, 8 aa, Artificial Sequence
  Protease cleavage sequence
LSGRSDYH

SEQ ID NO: 185 - protein, 8 aa, Artificial Sequence
  Protease cleavage sequence
LSGRSDNP

SEQ ID NO: 186 - protein, 8 aa, Artificial Sequence
  Protease cleavage sequence
LSGRSANP

SEQ ID NO: 187 - protein, 8 aa, Artificial Sequence
  Protease cleavage sequence
LSGRSANI

SEQ ID NO: 188 - protein, 8 aa, Artificial Sequence
  Protease cleavage sequence
LSGRSDNI

SEQ ID NO: 189 - protein, 13 aa, Artificial Sequence
  Protease cleavage sequence
ISSGLLSGRSDNH

SEQ ID NO: 190 - protein, 13 aa, Artificial Sequence
  Protease cleavage sequence
ISSGLLSGRSGNH

SEQ ID NO: 191 - protein, 15 aa, Artificial Sequence
  Protease cleavage sequence
ISSGLLSGRSANPRG

SEQ ID NO: 192 - protein, 17 aa, Artificial Sequence
  Protease cleavage sequence
AVGLLAPPSGRSANPRG

SEQ ID NO: 193 - protein, 13 aa, Artificial Sequence
  Protease cleavage sequence
ISSGLLSGRSDDH

SEQ ID NO: 194 - protein, 13 aa, Artificial Sequence
  Protease cleavage sequence
ISSGLLSGRSDIH

SEQ ID NO: 195 - protein, 13 aa, Artificial Sequence
  Protease cleavage sequence
ISSGLLSGRSDQH

SEQ ID NO: 196 - protein, 13 aa, Artificial Sequence
  Protease cleavage sequence
ISSGLLSGRSDTH

SEQ ID NO: 197 - protein, 13 aa, Artificial Sequence
  Protease cleavage sequence
ISSGLLSGRSDYH

SEQ ID NO: 198 - protein, 13 aa, Artificial Sequence
  Protease cleavage sequence
ISSGLLSGRSDNP

SEQ ID NO: 199 - protein, 13 aa, Artificial Sequence
  Protease cleavage sequence
ISSGLLSGRSANP

SEQ ID NO: 200 - protein, 13 aa, Artificial Sequence
  Protease cleavage sequence
ISSGLLSGRSANI

SEQ ID NO: 201 - protein, 13 aa, Artificial Sequence
  Protease cleavage sequence
ISSGLLSGRSDNI

SEQ ID NO: 202 - protein, 18 aa, Artificial Sequence
  Protease cleavage sequence
AVGLLAPPGGLSGRSDNH

SEQ ID NO: 203 - protein, 18 aa, Artificial Sequence
  Protease cleavage sequence
AVGLLAPPGGLSGRSDDH

SEQ ID NO: 204 - protein, 18 aa, Artificial Sequence
  Protease cleavage sequence
AVGLLAPPGGLSGRSDIH

SEQ ID NO: 205 - protein, 18 aa, Artificial Sequence
  Protease cleavage sequence
AVGLLAPPGGLSGRSDQH

SEQ ID NO: 206 - protein, 18 aa, Artificial Sequence
  Protease cleavage sequence
AVGLLAPPGGLSGRSDTH

SEQ ID NO: 207 - protein, 18 aa, Artificial Sequence
  Protease cleavage sequence
AVGLLAPPGGLSGRSDYH

SEQ ID NO: 208 - protein, 18 aa, Artificial Sequence
  Protease cleavage sequence
AVGLLAPPGGLSGRSDNP

SEQ ID NO: 209 - protein, 18 aa, Artificial Sequence
  Protease cleavage sequence
AVGLLAPPGGLSGRSANP

SEQ ID NO: 210 - protein, 18 aa, Artificial Sequence
  Protease cleavage sequence
AVGLLAPPGGLSGRSANI

SEQ ID NO: 211 - protein, 18 aa, Artificial Sequence
  Protease cleavage sequence
AVGLLAPPGGLSGRSDNI

SEQ ID NO: 212 - protein, 8 aa, Artificial Sequence
  Protease cleavage sequence
PRFKIIGG

SEQ ID NO: 213 - protein, 8 aa, Artificial Sequence
  Protease cleavage sequence
PRFRIIGG

SEQ ID NO: 214 - protein, 9 aa, Artificial Sequence
  Protease cleavage sequence
SSRHRRALD

SEQ ID NO: 215 - protein, 14 aa, Artificial Sequence
  Protease cleavage sequence
RKSSIIIRMRDVVL

SEQ ID NO: 216 - protein, 15 aa, Artificial Sequence
  Protease cleavage sequence
SSSFDKGKYKKGDDA

SEQ ID NO: 217 - protein, 15 aa, Artificial Sequence
  Protease cleavage sequence
SSSFDKGKYKRGDDA

SEQ ID NO: 218 - protein, 4 aa, Artificial Sequence
  Protease cleavage sequence
IEGR

SEQ ID NO: 219 - protein, 4 aa, Artificial Sequence
  Protease cleavage sequence
IDGR

SEQ ID NO: 220 - protein, 7 aa, Artificial Sequence
  Protease cleavage sequence
GGSIDGR

SEQ ID NO: 221 - protein, 6 aa, Artificial Sequence
  Protease cleavage sequence
PLGLWA

SEQ ID NO: 222 - protein, 8 aa, Artificial Sequence
  Protease cleavage sequence
GPQGIAGQ

SEQ ID NO: 223 - protein, 8 aa, Artificial Sequence
  Protease cleavage sequence
GPQGLLGA

SEQ ID NO: 224 - protein, 5 aa, Artificial Sequence
  Protease cleavage sequence
GIAGQ

SEQ ID NO: 225 - protein, 8 aa, Artificial Sequence
  Protease cleavage sequence
GPLGIAGI

SEQ ID NO: 226 - protein, 8 aa, Artificial Sequence
  Protease cleavage sequence
GPEGLRVG

SEQ ID NO: 227 - protein, 8 aa, Artificial Sequence
  Protease cleavage sequence
YGAGLGVV

SEQ ID NO: 228 - protein, 8 aa, Artificial Sequence
  Protease cleavage sequence
AGLGVVER

SEQ ID NO: 229 - protein, 8 aa, Artificial Sequence
  Protease cleavage sequence
AGLGISST

SEQ ID NO: 230 - protein, 8 aa, Artificial Sequence
  Protease cleavage sequence
EPQALAMS

SEQ ID NO: 231 - protein, 8 aa, Artificial Sequence
  Protease cleavage sequence
QALAMSAI

SEQ ID NO: 232 - protein, 8 aa, Artificial Sequence
  Protease cleavage sequence
AAYHLVSQ

SEQ ID NO: 233 - protein, 8 aa, Artificial Sequence
  Protease cleavage sequence
MDAFLESS

SEQ ID NO: 234 - protein, 8 aa, Artificial Sequence
  Protease cleavage sequence
ESLPVVAV

SEQ ID NO: 235 - protein, 8 aa, Artificial Sequence
  Protease cleavage sequence
SAPAVESE

SEQ ID NO: 236 - protein, 8 aa, Artificial Sequence
  Protease cleavage sequence
DVAQFVLT

SEQ ID NO: 237 - protein, 8 aa, Artificial Sequence
  Protease cleavage sequence
VAQFVLTE

SEQ ID NO: 238 - protein, 8 aa, Artificial Sequence
  Protease cleavage sequence
AQFVLTEG

SEQ ID NO: 239 - protein, 8 aa, Artificial Sequence
  Protease cleavage sequence
PVQPIGPQ

SEQ ID NO: 240 - protein, 6 aa, Artificial Sequence
  Linker
GSADGG

SEQ ID NO: 241 - protein, 16 aa, Artificial Sequence
  Linker
PQGQGGGGSGGGGNSP

SEQ ID NO: 242 - protein, 8 aa, Artificial Sequence
  Linker
QGQSGQGG

SEQ ID NO: 243 - protein, 9 aa, Artificial Sequence
  WT Hep- Loop
QGKSKREKK

SEQ ID NO: 244 - protein, 5 aa, Artificial Sequence
  Modified IL12 heparin-binding loop sequence
QGSEK

SEQ ID NO: 245 - protein, 5 aa, Artificial Sequence
  Modified IL12 heparin-binding loop sequence
KDQTE

SEQ ID NO: 246 - protein, 5 aa, Artificial Sequence
  Modified IL12 heparin-binding loop sequence
QDDSE

SEQ ID NO: 247 - protein, 5 aa, Artificial Sequence
  Modified IL12 heparin-binding loop sequence
QDQTD

SEQ ID NO: 248 - protein, 5 aa, Artificial Sequence
  Modified IL12 heparin-binding loop sequence
QGEKK

SEQ ID NO: 249 - protein, 5 aa, Artificial Sequence
  Modified IL12 heparin-binding loop sequence
RDDSE

SEQ ID NO: 250 - protein, 7 aa, Artificial Sequence
  Modified IL12 heparin-binding loop sequence
QGSQEKK

SEQ ID NO: 251 - protein, 9 aa, Artificial Sequence
  Modified IL12 heparin-binding loop sequence
QGESKQEKK

SEQ ID NO: 252 - protein, 662 aa, Artificial Sequence
  IL12R(beta)1 Uniprot P42701
MEPLVTWVVPLLFLFLLSRQGAACRTSECCFQDPPYPDADSGSASGPRDLRCYRISSDRYECSWQYEGPTAGVSHFLRCCLSSGRCCYFAAGSATRLQFSDQAGVSVLYTVTLWVESWARNQTEKSPEVTLQLYNSVKYEPPLGDIKVSKLAGQLRMEWETPDNQVGAEVQFRHRTPSSPWKLGDCGPQDDDTESCLCPLEMNVAQEFQLRRRQLGSQGSSWSKWSSPVCVPPENPPQPQVRFSVEQLGQDGRRRLTLKEQPTQLELPEGCQGLAPGTEVTYRLQLHMLSCPCKAKATRTLHLGKMPYLSGAAYNVAVISSNQFGPGLNQTWHIPADTHTEPVALNISVGTNGTTMYWPARAQSMTYCIEWQPVGQDGGLATCSLTAPQDPDPAGMATYSWSRESGAMGQEKCYYITIFASAHPEKLTLWSTVLSTYHFGGNASAAGTPHHVSVKNHSLDSVSVDWAPSLLSTCPGVLKEYVVRCRDEDSKQVSEHPVQPTETQVTLSGLRAGVAYTVQVRADTAWLRGVWSQPQRFSIEVQVSDWLIFFASLGSFLSILLVGVLGYLGLNRAARHLCPPLPTPCASSAIEFPGGKETWQWINPVDFQEEASLQEALVVEMSWDKGERTEPLEKTELPEGAPELALDTELSLEDGDRCKAKM

SEQ ID NO: 253 - protein, 862 aa, Artificial Sequence
  IL12R(beta)2 Uniprot Q99665
MAHTFRGCSLAFMFIITWLLIKAKIDACKRGDVTVKPSHVILLGSTVNITCSLKPRQGCFHYSRRNKLILYKFDRRINFHHGHSLNSQVTGLPLGTTLFVCKLACINSDEIQICGAEIFVGVAPEQPQNLSCIQKGEQGTVACTWERGRDTHLYTEYTLQLSGPKNLTWQKQCKDIYCDYLDFGINLTPESPESNFTAKVTAVNSLGSSSSLPSTFTFLDIVRPLPPWDIRIKFQKASVSRCTLYWRDEGLVLLNRLRYRPSNSRLWNMVNVTKAKGRHDLLDLKPFTEYEFQISSKLHLYKGSWSDWSESLRAQTPEEEPTGMLDVWYMKRHIDYSRQQISLFWKNLSVSEARGKILHYQVTLQELTGGKAMTQNITGHTSWTTVIPRTGNWAVAVSAANSKGSSLPTRINIMNLCEAGLLAPRQVSANSEGMDNILVTWQPPRKDPSAVQEYVVEWRELHPGGDTQVPLNWLRSRPYNVSALISENIKSYICYEIRVYALSGDQGGCSSILGNSKHKAPLSGPHINAITEEKGSILISWNSIPVQEQMGCLLHYRIYWKERDSNSQPQLCEIPYRVSQNSHPINSLQPRVTYVLWMTALTAAGESSHGNEREFCLQGKANWMAFVAPSICIAIIMVGIFSTHYFQQKVFVLLAALRPQWCSREIPDPANSTCAKKYPIAEEKTQLPLDRLLIDWPTPEDPEPLVISEVLHQVTPVFRHPPCSNWPQREKGIQGHQASEKDMMHSASSPPPPRALQAESRQLVDLYKVLESRGSDPKPENPACPWTVLPAGDLPTHDGYLPSNIDDLPSHEAPLADSLEELEPQHISLSVFPSSSLHPLTFSCGDKLTLDQLKMRCDSLML

SEQ ID NO: 254 - protein, 217 aa, Artificial Sequence
  Human IgG1 Fc 231-447 (EU-numbering)
APELLGGPSVFLFPPKPKDTLMISRTPEVTCVVVDVSHEDPEVKFNWYVDGVEVHNAKTKPREEQYNSTYRVVSVLTVLHQDWLNGKEYKCKVSNKALPAPIEKTISKAKGQPREPQVYTLPPSRDELTKNQVSLTCLVKGFYPSDIAVEWESNGQPENNYKTTPPVLDSDGSFFLYSKLTVDKSRWQQGNVFSCSVMHEALHNHYTQKSLSLSPGK

SEQ ID NO: 255 - protein, 118 aa, Artificial Sequence
  h6F6 VH
QVQLVQSGAEVKKPGASVKVSCKASGYTFTDYYLHWVRQAPGQGLEWMGWIDPENGDTEYAPKFQGRVTMTTDTSTSTAYMELRSLRSDDTAVYYCNANKELRYFDVWGQGTMVTVSS

SEQ ID NO: 256 - protein, 107 aa, Artificial Sequence
  h6F6 VLDR
EIVMTQSPATLSVSPGERATLSCRASQSISINLHWYQQKPGQAPRLLIYFASQSISGIPARFSGSGSGTEFTLTISSLQSEDFAVYYCQQSNSFPLTFGGGTKVEIK

SEQ ID NO: 257 - protein, 5 aa, Artificial Sequence
  h6F6 VHCDR1
DYYLH

SEQ ID NO: 258 - protein, 17 aa, Artificial Sequence
  h6F6 VHCDR2
WIDPENGDTEYAPKFQG

SEQ ID NO: 259 - protein, 9 aa, Artificial Sequence
  h6F6 VHCDR3
NKELRYFDV

SEQ ID NO: 260 - protein, 11 aa, Artificial Sequence
  h6F6 VLCDR1
RASQSISINLH

SEQ ID NO: 261 - protein, 7 aa, Artificial Sequence
  h6F6 VLCDR2
FASQSIS

SEQ ID NO: 262 - protein, 9 aa, Artificial Sequence
  h6F6 VLCDR3
QQSNSFPLT

SEQ ID NO: 263 - protein, 629 aa, Artificial Sequence
  IL23R Full Uniprot Q5VWK5
MNQVTIQWDAVIALYILFSWCHGGITNINCSGHIWVEPATIFKMGMNISIYCQAAIKNCQPRKLHFYKNGIKERFQITRINKTTARLWYKNFLEPHASMYCTAECPKHFQETLICGKDISSGYPPDIPDEVTCVIYEYSGNMTCTWNAGKLTYIDTKYVVHVKSLETEEEQQYLTSSYINISTDSLQGGKKYLVWVQAANALGMEESKQLQIHLDDIVIPSAAVISRAETINATVPKTIIYWDSQTTIEKVSCEMRYKATTNQTWNVKEFDTNFTYVQQSEFYLEPNIKYVFQVRCQETGKRYWQPWSSLFFHKTPETVPQVTSKAFQHDTWNSGLTVASISTGHLTSDNRGDIGLLLGMIVFAVMLSILSLIGIFNRSFRTGIKRRILLLIPKWLYEDIPNMKNSNVVKMLQENSELMNNNSSEQVLYVDPMITEIKEIFIPEHKPTDYKKENTGPLETRDYPQNSLFDNTTVVYIPDLNTGYKPQISNFLPEGSHLSNNNEITSLTLKPPVDSLDSGNNPRLQKHPNFAFSVSSVNSLSNTIFLGELSLILNQGECSSPDIQNSVEEETTMLLENDSPSETIPEQTLLPDEFVSCLGIVNEELPSINTYFPQNILESHFNRISLLEK

SEQ ID NO: 264 - protein, 332 aa, Artificial Sequence
  IL23R_ECD_24-355 Q5VWK5
GITNINCSGHIWVEPATIFKMGMNISIYCQAAIKNCQPRKLHFYKNGIKERFQITRINKTTARLWYKNFLEPHASMYCTAECPKHFQETLICGKDISSGYPPDIPDEVTCVIYEYSGNMTCTWNAGKLTYIDTKYVVHVKSLETEEEQQYLTSSYINISTDSLQGGKKYLVWVQAANALGMEESKQLQIHLDDIVIPSAAVISRAETINATVPKTIIYWDSQTTIEKVSCEMRYKATTNQTWNVKEFDTNFTYVQQSEFYLEPNIKYVFQVRCQETGKRYWQPWSSLFFHKTPETVPQVTSKAFQHDTWNSGLTVASISTGHLTSDNRGDIG

SEQ ID NO: 265 - protein, 295 aa, Artificial Sequence
  IL23R_ECD_24-318 (Ig, FN3-1 and FN3-2 domains) Q5VWK5
GITNINCSGHIWVEPATIFKMGMNISIYCQAAIKNCQPRKLHFYKNGIKERFQITRINKTTARLWYKNFLEPHASMYCTAECPKHFQETLICGKDISSGYPPDIPDEVTCVIYEYSGNMTCTWNAGKLTYIDTKYVVHVKSLETEEEQQYLTSSYINISTDSLQGGKKYLVWVQAANALGMEESKQLQIHLDDIVIPSAAVISRAETINATVPKTIIYWDSQTTIEKVSCEMRYKATTNQTWNVKEFDTNFTYVQQSEFYLEPNIKYVFQVRCQETGKRYWQPWSSLFFHKTPET

SEQ ID NO: 266 - protein, 103 aa, Artificial Sequence
  IL23R_ECD_24-126 (Ig domain) Q5VWK5
GITNINCSGHIWVEPATIFKMGMNISIYCQAAIKNCQPRKLHFYKNGIKERFQITRINKTTARLWYKNFLEPHASMYCTAECPKHFQETLICGKDISSGYPPD

SEQ ID NO: 267 - protein, 518 aa, Artificial Sequence
  p40-L-p35 (See CL_17876)
IWELKKDVYVVELDWYPDAPGEMVVLTCDTPEEDGITWTLDQSSEVLGSGKTLTIQVKEFGDAGQYTCHKGGEVLSHSLLLLHKKEDGIWSTDILKDQKEPKNKTFLRCEAKNYSGRFTCWWLTTISTDLTFSVKSSRGSSDPQGVTCGAATLSAERVRGDNKEYEYSVECQEDSACPAAEESLPIEVMVDAVHKLKYENYTSSFFIRDIIKPDPPKNLQLKPLKNSRQVEVSWEYPDTWSTPHSYFSLTFCVQVQGKSKREKKDRVFTDKTSATVICRKNASISVRAQDRYYSSSWSEWASVPCSGGGGSGGGGSGGGGSRNLPVATPDPGMFPCLHHSQNLLRAVSNMLQKARQTLEFYPCTSEEIDHEDITKDKTSTVEACLPLELTKNESCLNSRETSFITNGSCLASRKTSFMMALCLSSIYEDLKMYQVEFKTMNAKLLMDPKRQIFLDQNMLAVIDELMQALNFNSETVPQKSSLEEPDFYKTKIKLCILLHAFRIRAVTIDRVMSYLNAS

SEQ ID NO: 268 - protein, 517 aa, Artificial Sequence
  p40-L-p35(delta)R (See CL_22279)
IWELKKDVYVVELDWYPDAPGEMVVLTCDTPEEDGITWTLDQSSEVLGSGKTLTIQVKEFGDAGQYTCHKGGEVLSHSLLLLHKKEDGIWSTDILKDQKEPKNKTFLRCEAKNYSGRFTCWWLTTISTDLTFSVKSSRGSSDPQGVTCGAATLSAERVRGDNKEYEYSVECQEDSACPAAEESLPIEVMVDAVHKLKYENYTSSFFIRDIIKPDPPKNLQLKPLKNSRQVEVSWEYPDTWSTPHSYFSLTFCVQVQGKSKREKKDRVFTDKTSATVICRKNASISVRAQDRYYSSSWSEWASVPCSGGGGSGGGGSGGGGSNLPVATPDPGMFPCLHHSQNLLRAVSNMLQKARQTLEFYPCTSEEIDHEDITKDKTSTVEACLPLELTKNESCLNSRETSFITNGSCLASRKTSFMMALCLSSIYEDLKMYQVEFKTMNAKLLMDPKRQIFLDQNMLAVIDELMQALNFNSETVPQKSSLEEPDFYKTKIKLCILLHAFRIRAVTIDRVMSYLNAS

SEQ ID NO: 269 - protein, 517 aa, Artificial Sequence
  p40HEP-L-p35(delta)R (Hep graft as in v30818 - See CL_22291)
IWELKKDVYVVELDWYPDAPGEMVVLTCDTPEEDGITWTLDQSSEVLGSGKTLTIQVKEFGDAGQYTCHKGGEVLSHSLLLLHKKEDGIWSTDILKDQKEPKNKTFLRCEAKNYSGRFTCWWLTTISTDLTFSVKSSRGSSDPQGVTCGAATLSAERVRGDNKEYEYSVECQEDSACPAAEESLPIEVMVDAVHKLKYENYTSSFFIRDIIKPDPPKNLQLKPLKNSRQVEVSWEYPDTWSTPHSYFSLTFCVQVQGESKQEKKDRVFTDKTSATVICRKNASISVRAQDRYYSSSWSEWASVPCSGGGGSGGGGSGGGGSNLPVATPDPGMFPCLHHSQNLLRAVSNMLQKARQTLEFYPCTSEEIDHEDITKDKTSTVEACLPLELTKNESCLNSRETSFITNGSCLASRKTSFMMALCLSSIYEDLKMYQVEFKTMNAKLLMDPKRQIFLDQNMLAVIDELMQALNFNSETVPQKSSLEEPDFYKTKIKLCILLHAFRIRAVTIDRVMSYLNAS

SEQ ID NO: 270 - protein, 108 aa, Artificial Sequence
  h6F6 VL Full
EIVMTQSPATLSVSPGERATLSCRASQSISINLHWYQQKPGQAPRLLIYFASQSISGIPARFSGSGSGTEFTLTISSLQSEDFAVYYCQQSNSFPLTFGGGTKVEIKR

SEQ ID NO: 271 - protein, 106 aa, Artificial Sequence
  CRIS7 CD3 VL
DIQMTQSPSSLSASVGDRVTMTCSASSSVSYMNWYQQKPGKAPKRWIYDSSKLASGVPARFSGSGSGTDYTLTISSLQPEDFATYYCQQWSRNPPTFGGGTKLQIT

SEQ ID NO: 272 - protein, 121 aa, Artificial Sequence
  CRIS7 CD3 VH
QVQLVESGGGVVQPGRSLRLSCKASGYTFTRSTMHWVRQAPGQGLEWIGYINPSSAYTNYNQKFKDRFTISADKSKSTAFLQMDSLRPEDTGVYFCARPQVHYDYNGFPYWGQGTPVTVSS

SEQ ID NO: 273 - protein, 246 aa, Artificial Sequence
  Trastuzumab scFv
DIQMTQSPSSLSASVGDRVTITCRASQDVNTAVWYQQKPGKAPKLLIYSASFLYSGVPSRFSGSRSGTDFTLTISSLQPEDFATYYCQQHYTTPPTFGQGTKVEIKGGSGGGSGGGSGGGSGGGSGEVQLVESGGGLVQPGGSLRLSCAASGFNIKDTYIHWVRQAPGKGLEWVARIYPTNGYTRYADSVKGRFTISADTSKNTAYLQMNSLRAEDTAVYYCSRWGGDGFYAMDYWGQGTLVTVSS

SEQ ID NO: 274 - protein, 106 aa, Artificial Sequence
  Chain A CH3 region
GQPREPQVYVYPPSRDELTKNQVSLTCLVKGFYPSDIAVEWESNGQPENNYKTTPPVLDSDGSFALVSKLTVDKSRWQQGNVFSCSVMHEALHNHYTQKSLSLSPG

SEQ ID NO: 275 - protein, 106 aa, Artificial Sequence
  Chain B CH3 region
GQPREPQVYVLPPSRDELTKNQVSLLCLVKGFYPSDIAVEWESNGQPENNYLTWPPVLDSDGSFFLYSKLTVDKSRWQQGNVFSCSVMHEALHNHYTQKSLSLSPG

SEQ ID NO: 276 - protein, 110 aa, Artificial Sequence
  CH2 region with L234A-L235A_D265S mutations
APEAAGGPSVFLFPPKPKDTLMISRTPEVTCVVVSVSHEDPEVKFNWYVDGVEVHNAKTKPREEQYNSTYRVVSVLTVLHQDWLNGKEYKCKVSNKALPAPIEKTISKAK

SEQ ID NO: 277 - protein, 114 aa, Artificial Sequence
  Wild type PD-1
NPPTFSPALLVVTEGDNATFTCSFSNTSESFVLNWYRMSPSNQTDKLAAFPEDRSQPGQDCRFRVTQLPNGRDFHMSVVRARRNDSGTYLCGAISLAPKAQIKESLRAELRVTE

SEQ ID NO: 278 - protein, 115 aa, Artificial Sequence [sequence omitted]

SEQ ID NO: 279 - protein, 114 aa, Artificial Sequence
  High affinity PD-1
NPPTFSPALLVVTEGDNATFTCSFSNTSESFHVVWHRESPSGQTDTLAAFPEDRSQPGQDARFRVTQLPNGRDFHMSVVRARRNDSGTYVCGVISLAPKIQIKESLRAELRVTE

SEQ ID NO: 280 - protein, 213 aa, Artificial Sequence
  CL_ 12985 full AA
DIQMTQSPSSLSASVGDRVTMTCSASSSVSYMNWYQQKPGKAPKRWIYDSSKLASGVPARFSGSGSGTDYTLTISSLQPEDFATYYCQQWSRNPPTFGGGTKLQITRTVAAPSVFIFPPSDEQLKSGTASVVCLLNNFYPREAKVQWKVDNALQSGNSQESVTEQDSKDSTYSLSSTLTLSKADYEKHKVYACEVTHQGLSSPVTKSFNRGEC

SEQ ID NO: 281 - protein, 450 aa, Artificial Sequence
  CL_ 12989 full AA
QVQLVESGGGVVQPGRSLRLSCKASGYTFTRSTMHWVRQAPGQGLEWIGYINPSSAYTNYNQKFKDRFTISADKSKSTAFLQMDSLRPEDTGVYFCARPQVHYDYNGFPYWGQGTPVTVSSASTKGPSVFPLAPSSKSTSGGTAALGCLVKDYFPEPVTVSWNSGALTSGVHTFPAVLQSSGLYSLSSVVTVPSSSLGTQTYICNVNHKPSNTKVDKKVEPKSCDKTHTCPPCPAPEAAGGPSVFLFPPKPKDTLMISRTPEVTCVVVSVSHEDPEVKFNWYVDGVEVHNAKTKPREEQYNSTYRVVSVLTVLHQDWLNGKEYKCKVSNKALPAPIEKTISKAKGQPREPQVYVYPPSRDELTKNQVSLTCLVKGFYPSDIAVEWESNGQPENNYKTTPPVLDSDGSFALVSKLTVDKSRWQQGNVFSCSVMHEALHNHYTQKSLSLSPG

SEQ ID NO: 282 - protein, 478 aa, Artificial Sequence
  CL_ 21490 full AA
DIQMTQSPSSLSASVGDRVTITCRASQDVNTAVAWYQQKPGKAPKLLIYSASFLYSGVPSRFSGSRSGTDFTLTISSLQPEDFATYYCQQHYTTPPTFGQGTKVEIKGGSGGGSGGGSGGGSGGGSGEVQLVESGGGLVQPGGSLRLSCAASGFNIKDTYIHWVRQAPGKGLEWVARIYPTNGYTRYADSVKGRFTISADTSKNTAYLQMNSLRAEDTAVYYCSRWGGDGFYAMDYWGQGTLVTVSSEPKSSDKTHTCPPCPAPEAAGGPSVFLFPPKPKDTLMISRTPEVTCVVVSVSHEDPEVKFNWYVDGVEVHNAKTKPREEQYNSTYRVVSVLTVLHQDWLNGKEYKCKVSNKALPAPIEKTISKAKGQPREPQVYVLPPSRDELTKNQVSLLCLVKGFYPSDIAVEWESNGQPENNYLTWPPVLDSDGSFFLYSKLTVDKSRWQQGNVFSCSVMHEALHNHYTQKSLSLSPG

SEQ ID NO: 283 - protein, 574 aa, Artificial Sequence
  CL_ 22080 full AA
NPPTFSPALLVVTEGDNATFTCSFSNTSESFHVVWHRESPSGQTDTLAAFPEDRSQPGQDARFRVTQLPNGRDFHMSVVRARRNDSGTYVCGVISLAPKIQIKESLRAELRVTEEAAAKEAAAKQVQLVESGGGVVQPGRSLRLSCKASGYTFTRSTMHWVRQAPGQGLEWIGYINPSSAYTNYNQKFKDRFTISADKSKSTAFLQMDSLRPEDTGVYFCARPQVHYDYNGFPYWGQGTPVTVSSASTKGPSVFPLAPSSKSTSGGTAALGCLVKDYFPEPVTVSWNSGALTSGVHTFPAVLQSSGLYSLSSVVTVPSSSLGTQTYICNVNHKPSNTKVDKKVEPKSCDKTHTCPPCPAPEAAGGPSVFLFPPKPKDTLMISRTPEVTCVVVSVSHEDPEVKFNWYVDGVEVHNAKTKPREEQYNSTYRVVSVLTVLHQDWLNGKEYKCKVSNKALPAPIEKTISKAKGQPREPQVYVYPPSRDELTKNQVSLTCLVKGFYPSDIAVEWESNGQPENNYKTTPPVLDSDGSFALVSKLTVDKSRWQQGNVFSCSVMHEALHNHYTQKSLSLSPG

SEQ ID NO: 284 - protein, 574 aa, Artificial Sequence
  CL_ 22082 full AA
NPPTFSPALLVVTEGDNATFTCSFSNTSESFVLNWYRMSPSNQTDKLAAFPEDRSQPGQDSRFRVTQLPNGRDFHMSVVRARRNDSGTYLCGAISLAPKAQIKESLRAELRVTEEAAAKEAAAKQVQLVESGGGVVQPGRSLRLSCKASGYTFTRSTMHWVRQAPGQGLEWIGYINPSSAYTNYNQKFKDRFTISADKSKSTAFLQMDSLRPEDTGVYFCARPQVHYDYNGFPYWGQGTPVTVSSASTKGPSVFPLAPSSKSTSGGTAALGCLVKDYFPEPVTVSWNSGALTSGVHTFPAVLQSSGLYSLSSVVTVPSSSLGTQTYICNVNHKPSNTKVDKKVEPKSCDKTHTCPPCPAPEAAGGPSVFLFPPKPKDTLMISRTPEVTCVVVSVSHEDPEVKFNWYVDGVEVHNAKTKPREEQYNSTYRVVSVLTVLHQDWLNGKEYKCKVSNKALPAPIEKTISKAKGQPREPQVYVYPPSRDELTKNQVSLTCLVKGFYPSDIAVEWESNGQPENNYKTTPPVLDSDGSFALVSKLTVDKSRWQQGNVFSCSVMHEALHNHYTQKSLSLSPG

SEQ ID NO: 285 - protein, 577 aa, Artificial Sequence
  CL_ 22083 full AA
NPPTFSPALLVVTEGDNATFTCSFSNTSESFVLNWYRMSPSNQTDKLAAFPEDRSQPGQDSRFRVTQLPNGRDFHMSVVRARRNDSGTYLCGAISLAPKAQIKESLRAELRVTEMSGRSANAEAAAKQVQLVESGGGVVQPGRSLRLSCKASGYTFTRSTMHWVRQAPGQGLEWIGYINPSSAYTNYNQKFKDRFTISADKSKSTAFLQMDSLRPEDTGVYFCARPQVHYDYNGFPYWGQGTPVTVSSASTKGPSVFPLAPSSKSTSGGTAALGCLVKDYFPEPVTVSWNSGALTSGVHTFPAVLQSSGLYSLSSVVTVPSSSLGTQTYICNVNHKPSNTKVDKKVEPKSCDKTHTCPPCPAPEAAGGPSVFLFPPKPKDTLMISRTPEVTCVVVSVSHEDPEVKFNWYVDGVEVHNAKTKPREEQYNSTYRVVSVLTVLHQDWLNGKEYKCKVSNKALPAPIEKTISKAKGQPREPQVYVYPPSRDELTKNQVSLTCLVKGFYPSDIAVEWESNGQPENNYKTTPPVLDSDGSFALVSKLTVDKSRWQQGNVFSCSVMHEALHNHYTQKSLSLSPG

SEQ ID NO: 286 - protein, 582 aa, Artificial Sequence
  CL_ 22086 full AA
NPPTFSPALLVVTEGDNATFTCSFSNTSESFVLNWYRMSPSNQTDKLAAFPEDRSQPGQDSRFRVTQLPNGRDFHMSVVRARRNDSGTYLCGAISLAPKAQIKESLRAELRVTEEAAAKEAAAKMSGRSANAQVQLVESGGGVVQPGRSLRLSCKASGYTFTRSTMHWVRQAPGQGLEWIGYINPSSAYTNYNQKFKDRFTISADKSKSTAFLQMDSLRPEDTGVYFCARPQVHYDYNGFPYWGQGTPVTVSSASTKGPSVFPLAPSSKSTSGGTAALGCLVKDYFPEPVTVSWNSGALTSGVHTFPAVLQSSGLYSLSSVVTVPSSSLGTQTYICNVNHKPSNTKVDKKVEPKSCDKTHTCPPCPAPEAAGGPSVFLFPPKPKDTLMISRTPEVTCVVVSVSHEDPEVKFNWYVDGVEVHNAKTKPREEQYNSTYRVVSVLTVLHQDWLNGKEYKCKVSNKALPAPIEKTISKAKGQPREPQVYVYPPSRDELTKNQVSLTCLVKGFYPSDIAVEWESNGQPENNYKTTPPVLDSDGSFALVSKLTVDKSRWQQGNVFSCSVMHEALHNHYTQKSLSLSPG

SEQ ID NO: 287 - protein, 338 aa, Artificial Sequence
  CL_ 22091 full AA
AFTVTVPKDLYVVEYGSNMTIECKFPVEKQLDLAALIVYWEMEDKNIIQFVHGEEDLKVQHSSYRQRARLLKDQLSLGNAALQITDVKLQDAGVYRCMISYGGADYKRITVKVNAEAAAKEAAAKDIQMTQSPSSLSASVGDRVTMTCSASSSVSYMNWYQQKPGKAPKRWIYDSSKLASGVPARFSGSGSGTDYTLTISSLQPEDFATYYCQQWSRNPPTFGGGTKLQITRTVAAPSVFIFPPSDEQLKSGTASVVCLLNNFYPREAKVQWKVDNALQSGNSQESVTEQDSKDSTYSLSSTLTLSKADYEKHKVYACEVTHQGLSSPVTKSFNRGEC

SEQ ID NO: 288 - protein, 338 aa, Artificial Sequence
  CL_ 22092 full AA
AFTVTVPKDLYVVEYGSNMTIECKFPVEKQLDLAALQVFWMMEDKNIIQFVHGEEDLKVQHSSYRQRARLLKDQLSLGNAALQITDVKLQDAGVYTCLIAYKGADYKRITVKVNAEAAAKEAAAKDIQMTQSPSSLSASVGDRVTMTCSASSSVSYMNWYQQKPGKAPKRWIYDSSKLASGVPARFSGSGSGTDYTLTISSLQPEDFATYYCQQWSRNPPTFGGGTKLQITRTVAAPSVFIFPPSDEQLKSGTASVVCLLNNFYPREAKVQWKVDNALQSGNSQESVTEQDSKDSTYSLSSTLTLSKADYEKHKVYACEVTHQGLSSPVTKSFNRGEC

SEQ ID NO: 289 - protein, 341 aa, Artificial Sequence
  CL_ 22094 full AA
AFTVTVPKDLYVVEYGSNMTIECKFPVEKQLDLAALIVYWEMEDKNIIQFVHGEEDLKVQHSSYRQRARLLKDQLSLGNAALQITDVKLQDAGVYRCMISYGGADYKRITVKVNAEAAAKMSGRSANADIQMTQSPSSLSASVGDRVTMTCSASSSVSYMNWYQQKPGKAPKRWIYDSSKLASGVPARFSGSGSGTDYTLTISSLQPEDFATYYCQQWSRNPPTFGGGTKLQITRTVAAPSVFIFPPSDEQLKSGTASVVCLLNNFYPREAKVQWKVDNALQSGNSQESVTEQDSKDSTYSLSSTLTLSKADYEKHKVYACEVTHQGLSSPVTKSFNRGEC

SEQ ID NO: 290 - protein, 346 aa, Artificial Sequence
  CL_ 22096 full AA
AFTVTVPKDLYVVEYGSNMTIECKFPVEKQLDLAALIVYWEMEDKNIIQFVHGEEDLKVQHSSYRQRARLLKDQLSLGNAALQITDVKLQDAGVYRCMISYGGADYKRITVKVNAEAAAKEAAAKMSGRSANADIQMTQSPSSLSASVGDRVTMTCSASSSVSYMNWYQQKPGKAPKRWIYDSSKLASGVPARFSGSGSGTDYTLTISSLQPEDFATYYCQQWSRNPPTFGGGTKLQITRTVAAPSVFIFPPSDEQLKSGTASVVCLLNNFYPREAKVQWKVDNALQSGNSQESVTEQDSKDSTYSLSSTLTLSKADYEKHKVYACEVTHQGLSSPVTKSFNRGEC

SEQ ID NO: 291 - DNA, 639 bp, Artificial Sequence
  CL_ 12985 full nt
gacatccagatgacacagagcccaagctccctgagcgcctccgtgggcgatagggtgaccatgacatgctctgcctctagctccgtgagctacatgaactggtatcagcagaagccaggcaaggcccccaagcggtggatctacgactctagcaagctggcctccggagtgcccgccagattttctggcagcggctccggcaccgactataccctgacaatctcctctctgcagcctgaggatttcgccacatactattgtcagcagtggtctaggaatccccctacctttggcggcggcacaaagctgcagatcacccgcacagtggcggcgcccagtgtcttcatttttccccctagcgacgaacagctgaagtctgggacagccagtgtggtctgtctgctgaacaacttctaccctagagaggctaaagtgcagtggaaggtcgataacgcactgcagtccggaaattctcaggagagtgtgactgaacaggactcaaaagatagcacctattccctgtcaagcacactgactctgagcaaggccgactacgagaagcataaagtgtatgcttgtgaagtcacccaccaggggctgagttcaccagtcacaaaatcattcaacagaggggagtgc

SEQ ID NO: 292 - DNA, 1350 bp, Artificial Sequence
  CL_ 12989 full nt
caggtgcagctggtggagtctggcggcggcgtggtgcagcccggcagaagcctgcggctgagctgcaaggcctctggctacacctttacaaggagcaccatgcactgggtgcgccaggcccctggacagggcctggagtggatcggctatatcaacccaagctccgcctacacaaactataatcagaagttcaaggaccggtttaccatcagcgccgataagtccaagtctacagccttcctgcagatggactccctgcggccagaggatacaggcgtgtacttctgtgccagaccccaggtgcactacgactataatggctttccctattggggccagggcacccctgtgacagtgtctagcgctagcactaaggggccttccgtgtttccactggctccctctagtaaatccacctctggaggcacagctgcactgggatgtctggtgaaggattacttccctgaaccagtcacagtgagttggaactcaggggctctgacaagtggagtccatacttttcccgcagtgctgcagtcaagcggactgtactccctgtcctctgtggtcaccgtgcctagttcaagcctgggcacccagacatatatctgcaacgtgaatcacaagccatcaaatacaaaagtcgacaagaaagtggagcccaagagctgtgataaaactcatacctgcccaccttgtccggcgccagaggctgcaggaggaccaagcgtgttcctgtttccacccaagcctaaagacacactgatgatttcccgaacccccgaagtcacatgcgtggtcgtgtctgtgagtcacgaggaccctgaagtcaagttcaactggtacgtggatggcgtcgaggtgcataatgccaagactaaacctagggaggaacagtacaactcaacctatcgcgtcgtgagcgtcctgacagtgctgcaccaggattggctgaacggcaaagaatataagtgcaaagtgagcaataaggccctgcccgctcctatcgagaaaaccatttccaaggctaaagggcagcctcgcgaaccacaggtctacgtgtatcctccaagccgggacgagctgacaaagaaccaggtctccctgacttgtctggtgaaagggttttaccctagtgatatcgctgtggagtgggaatcaaatggacagccagagaacaattataagactaccccccctgtgctggacagtgatgggtcattcgcactggtctccaagctgacagtggacaaatctcggtggcagcagggaaatgtcttttcatgtagcgtgatgcatgaagcactgcacaaccattacacccagaagtcactgtcactgtcaccagga

SEQ ID NO: 293 - DNA, 1434 bp, Artificial Sequence
  CL_ 21490 full nt
gacatccagatgacacagtctcctagctccctgtctgccagcgtgggcgacagggtgaccatcacatgcagggccagccaggatgtgaacaccgccgtggcctggtaccagcagaagcctggcaaggccccaaagctgctgatctactccgcctctttcctgtatagcggcgtgccttcccggtttagcggctccagatctggcaccgacttcaccctgacaatctctagcctgcagccagaggattttgccacatactattgccagcagcactataccacaccccctaccttcggccagggcacaaaggtggagatcaagggaggctctggaggaggcagcggaggaggctccggaggaggctctggcggcggcagcggcgaggtgcagctggtggagtccggcggcggcctggtgcagcccggcggctccctgcggctgtcttgtgccgccagcggcttcaacatcaaggatacctacatccactgggtgcggcaggccccaggcaagggactggagtgggtggccagaatctatcccaccaatggctacacacggtatgccgacagcgtgaagggccggttcaccatctccgccgatacctctaagaacacagcctacctgcagatgaatagcctgagggccgaggacacagccgtgtactattgttcccgctggggaggcgacggcttctacgcaatggattattggggccagggcaccctggtgacagtgtcctctgagcctaagagctccgataagacccacacatgcccaccctgtccggcgccagaggccgccggaggaccaagcgtgttcctgtttccacccaagcccaaggacaccctgatgatctcccggaccccagaggtgacatgcgtggtggtgagcgtgtcccacgaggaccccgaggtgaagtttaactggtacgtggatggcgtggaggtgcacaatgccaagacaaagccccgggaggagcagtacaattctacctatagagtggtgagcgtgctgacagtgctgcaccaggattggctgaacggcaaggagtataagtgtaaggtgagcaataaggccctgccagcccccatcgagaagaccatctccaaggccaagggccagcctcgcgaaccacaggtctacgtgctgccccctagccgcgacgaactgactaaaaatcaggtctctctgctgtgtctggtcaaaggattctacccttccgacatcgccgtggagtgggaaagtaacggccagcccgagaacaattacctgacctggccccctgtgctggactctgatgggagtttctttctgtattcaaagctgacagtcgataaaagccggtggcagcagggcaatgtgttcagctgctccgtcatgcacgaagcactgcacaaccattacactcagaagtccctgtccctgtcacctggc

SEQ ID NO: 294 - DNA, 1722 bp, Artificial Sequence
  CL_ 22080 full nt
aacccccctaccttttccccagccctgctggtggtgacagagggcgacaacgccaccttcacatgctcttttagcaatacatccgagtctttccacgtggtgtggcaccgggagagcccatccggacagaccgatacactggccgcctttccagaggacagatctcagccaggacaggatgcaaggttccgcgtgacccagctgccaaacggcagggactttcacatgtctgtggtgcgcgcccggagaaatgatagcggcacatacgtgtgcggcgtgatctccctggcccctaagatccagatcaaggagagcctgagggcagagctgagggtgaccgaggaggctgccgccaaggaggctgccgccaagcaggtgcagctggtggagtctggaggaggagtggtgcagcccggcagaagcctgcggctgagctgtaaggcctccggctacaccttcacacggagcaccatgcactgggtgagacaggcccccggacagggactggagtggatcggctatatcaatcctagctccgcctacacaaactataatcagaagtttaaggaccggtttaccatcagcgccgataagtccaagtctacagccttcctgcagatggactccctgcggccagaggatacaggcgtgtacttctgtgccagaccccaggtgcactacgactataacggctttccctattggggccagggcacccctgtgacagtgtctagcgctagcactaaggggccttccgtgtttccactggctccctctagtaaatccacctctggaggcacagctgcactgggatgtctggtgaaggattacttccctgaaccagtcacagtgagttggaactcaggggctctgacaagtggagtccatacttttcccgcagtgctgcagtcaagcggactgtactccctgtcctctgtggtcaccgtgcctagttcaagcctgggcacccagacatatatctgcaacgtgaatcacaagccatcaaatacaaaagtcgacaagaaagtggagcccaagagctgtgataaaactcatacctgcccaccttgtccggcgccagaggctgcaggaggaccaagcgtgttcctgtttccacccaagcctaaagacacactgatgatttcccgaacccccgaagtcacatgcgtggtcgtgtctgtgagtcacgaggaccctgaagtcaagttcaactggtacgtggatggcgtcgaggtgcataatgccaagactaaacctagggaggaacagtacaactcaacctatcgcgtcgtgagcgtcctgacagtgctgcaccaggattggctgaacggcaaagaatataagtgcaaagtgagcaataaggccctgcccgctcctatcgagaaaaccatttccaaggctaaagggcagcctcgcgaaccacaggtctacgtgtatcctccaagccgggacgagctgacaaagaaccaggtctccctgacttgtctggtgaaagggttttaccctagtgatatcgctgtggagtgggaatcaaatggacagccagagaacaattataagactaccccccctgtgctggacagtgatgggtcattcgcactggtctccaagctgacagtggacaaatctcggtggcagcagggaaatgtcttttcatgtagcgtgatgcatgaagcactgcacaaccattacacccagaagtcactgtcactgtcaccagga

SEQ ID NO: 295 - DNA, 1722 bp, Artificial Sequence
  CL_ 22082 full nt
aatccccctacctttagcccagccctgctggtggtgacagagggcgacaacgccaccttcacatgctcttttagcaacacctccgagtctttcgtgctgaattggtacagaatgagcccatccaaccagacagataagctggccgcctttccagaggacagatctcagcccggccaggatagcaggttccgcgtgacccagctgcccaatggcagggactttcacatgtccgtggtgcgcgcccggagaaacgattctggcacatatctgtgcggagccatcagcctggcccctaaggcacagatcaaggagtccctgagggcagagctgagggtgacagaggaggctgccgccaaggaggctgccgccaagcaggtgcagctggtggagtccggaggaggagtggtgcagcccggcagaagcctgcggctgagctgtaaggcctccggctacaccttcacacggtctaccatgcactgggtgagacaggcccccggacagggactggagtggatcggctatatcaatcctagctccgcctacacaaactataatcagaagtttaaggaccggtttaccatcagcgccgataagtccaagtctacagccttcctgcagatggactccctgcggccagaggatacaggcgtgtacttctgtgccagaccccaggtgcactacgactataacggctttccctattggggccagggcacccctgtgacagtgtctagcgctagcactaaggggccttccgtgtttccactggctccctctagtaaatccacctctggaggcacagctgcactgggatgtctggtgaaggattacttccctgaaccagtcacagtgagttggaactcaggggctctgacaagtggagtccatacttttcccgcagtgctgcagtcaagcggactgtactccctgtcctctgtggtcaccgtgcctagttcaagcctgggcacccagacatatatctgcaacgtgaatcacaagccatcaaatacaaaagtcgacaagaaagtggagcccaagagctgtgataaaactcatacctgcccaccttgtccggcgccagaggctgcaggaggaccaagcgtgttcctgtttccacccaagcctaaagacacactgatgatttcccgaacccccgaagtcacatgcgtggtcgtgtctgtgagtcacgaggaccctgaagtcaagttcaactggtacgtggatggcgtcgaggtgcataatgccaagactaaacctagggaggaacagtacaactcaacctatcgcgtcgtgagcgtcctgacagtgctgcaccaggattggctgaacggcaaagaatataagtgcaaagtgagcaataaggccctgcccgctcctatcgagaaaaccatttccaaggctaaagggcagcctcgcgaaccacaggtctacgtgtatcctccaagccgggacgagctgacaaagaaccaggtctccctgacttgtctggtgaaagggttttaccctagtgatatcgctgtggagtgggaatcaaatggacagccagagaacaattataagactaccccccctgtgctggacagtgatgggtcattcgcactggtctccaagctgacagtggacaaatctcggtggcagcagggaaatgtcttttcatgtagcgtgatgcatgaagcactgcacaaccattacacccagaagtcactgtcactgtcaccagga

SEQ ID NO: 296 - DNA, 1731 bp, Artificial Sequence
  CL_ 22083 full nt
aatccccctaccttttctccagccctgctggtggtgacagagggcgacaacgccaccttcacatgctcttttagcaacacctccgagtctttcgtgctgaattggtacagaatgagcccatccaaccagacagataagctggccgcctttccagaggacagatcccagcccggccaggattctaggttccgcgtgacccagctgcccaatggcagggactttcacatgagcgtggtgcgcgcccggagaaacgattccggcacatatctgtgcggagccatctctctggcccctaaggcccagatcaaggagtccctgagggcagagctgagggtgacagagatgtctggccggagcgccaatgccgaggctgccgccaagcaggtgcagctggtggagagcggaggaggagtggtgcagcccggcagaagcctgcggctgagctgtaaggccagcggctacaccttcacacggtccaccatgcactgggtgagacaggcccccggacagggactggagtggatcggctatatcaaccctagctccgcctacacaaactataatcagaagtttaaggaccggtttaccatcagcgccgataagtccaagtctacagccttcctgcagatggactccctgcggccagaggatacaggcgtgtacttctgtgccagaccccaggtgcactacgactataacggctttccctattggggccagggcacccctgtgacagtgtctagcgctagcactaaggggccttccgtgtttccactggctccctctagtaaatccacctctggaggcacagctgcactgggatgtctggtgaaggattacttccctgaaccagtcacagtgagttggaactcaggggctctgacaagtggagtccatacttttcccgcagtgctgcagtcaagcggactgtactccctgtcctctgtggtcaccgtgcctagttcaagcctgggcacccagacatatatctgcaacgtgaatcacaagccatcaaatacaaaagtcgacaagaaagtggagcccaagagctgtgataaaactcatacctgcccaccttgtccggcgccagaggctgcaggaggaccaagcgtgttcctgtttccacccaagcctaaagacacactgatgatttcccgaacccccgaagtcacatgcgtggtcgtgtctgtgagtcacgaggaccctgaagtcaagttcaactggtacgtggatggcgtcgaggtgcataatgccaagactaaacctagggaggaacagtacaactcaacctatcgcgtcgtgagcgtcctgacagtgctgcaccaggattggctgaacggcaaagaatataagtgcaaagtgagcaataaggccctgcccgctcctatcgagaaaaccatttccaaggctaaagggcagcctcgcgaaccacaggtctacgtgtatcctccaagccgggacgagctgacaaagaaccaggtctccctgacttgtctggtgaaagggttttaccctagtgatatcgctgtggagtgggaatcaaatggacagccagagaacaattataagactaccccccctgtgctggacagtgatgggtcattcgcactggtctccaagctgacagtggacaaatctcggtggcagcagggaaatgtcttttcatgtagcgtgatgcatgaagcactgcacaaccattacacccagaagtcactgtcactgtcaccagga

SEQ ID NO: 297 - DNA, 1746 bp, Artificial Sequence
  CL_ 22086 full nt
aatccccctaccttttctccagccctgctggtggtgacagagggcgacaacgccaccttcacatgctcttttagcaacacctccgagtctttcgtgctgaattggtacagaatgagcccatccaaccagacagataagctggccgcctttccagaggacagatcccagcccggccaggattctaggttccgcgtgacccagctgcccaatggcagggactttcacatgagcgtggtgcgcgcccggagaaacgattccggcacatatctgtgcggagccatctctctggcccctaaggcccagatcaaggagtccctgagggcagagctgagggtgacagaggaggctgccgccaaggaggctgccgccaagatgtctggccggagcgccaatgcccaggtgcagctggtggagagcggaggaggagtggtgcagcccggcagaagcctgcggctgagctgtaaggccagcggctacaccttcacacggtccaccatgcactgggtgagacaggcccccggacagggactggagtggatcggctatatcaaccctagctccgcctacacaaactataatcagaagtttaaggaccggtttaccatcagcgccgataagtccaagtctacagccttcctgcagatggactccctgcggccagaggatacaggcgtgtacttctgtgccagaccccaggtgcactacgactataacggctttccctattggggccagggcacccctgtgacagtgtctagcgctagcactaaggggccttccgtgtttccactggctccctctagtaaatccacctctggaggcacagctgcactgggatgtctggtgaaggattacttccctgaaccagtcacagtgagttggaactcaggggctctgacaagtggagtccatacttttcccgcagtgctgcagtcaagcggactgtactccctgtcctctgtggtcaccgtgcctagttcaagcctgggcacccagacatatatctgcaacgtgaatcacaagccatcaaatacaaaagtcgacaagaaagtggagcccaagagctgtgataaaactcatacctgcccaccttgtccggcgccagaggctgcaggaggaccaagcgtgttcctgtttccacccaagcctaaagacacactgatgatttcccgaacccccgaagtcacatgcgtggtcgtgtctgtgagtcacgaggaccctgaagtcaagttcaactggtacgtggatggcgtcgaggtgcataatgccaagactaaacctagggaggaacagtacaactcaacctatcgcgtcgtgagcgtcctgacagtgctgcaccaggattggctgaacggcaaagaatataagtgcaaagtgagcaataaggccctgcccgctcctatcgagaaaaccatttccaaggctaaagggcagcctcgcgaaccacaggtctacgtgtatcctccaagccgggacgagctgacaaagaaccaggtctccctgacttgtctggtgaaagggttttaccctagtgatatcgctgtggagtgggaatcaaatggacagccagagaacaattataagactaccccccctgtgctggacagtgatgggtcattcgcactggtctccaagctgacagtggacaaatctcggtggcagcagggaaatgtcttttcatgtagcgtgatgcatgaagcactgcacaaccattacacccagaagtcactgtcactgtcaccagga

SEQ ID NO: 298 - DNA, 1014 bp, Artificial Sequence
  CL_ 22091 full nt
gccttcaccgtgacagtgccaaaggatctgtacgtggtggagtatggcagcaacatgacaatcgagtgcaagttcccagtggagaagcagctggacctggccgccctgatcgtgtactgggagatggaggataagaatatcatccagtttgtgcacggcgaggaggacctgaaggtgcagcacagctcctatcggcagagagccaggctgctgaaggatcagctgagcctgggcaacgccgccctgcagatcaccgacgtgaagctgcaggatgccggggtgtacagatgcatgatctcctacggcggagccgactataagcggatcaccgtgaaggtgaacgccgaggctgccgccaaggaggctgccgccaaggatatccagatgacacagtccccttctagcctgtctgccagcgtgggcgacagggtgaccatgacatgttccgcctcctctagcgtgtcttacatgaactggtatcagcagaagccaggcaaggcccccaagagatggatctacgactcctctaagctggcctctggcgtgcccgccaggttctccggctctggcagcggcaccgattataccctgacaatcagctccctgcagcctgaggacttcgccacatactattgtcagcagtggtcccgcaatccccctacctttggcggcggcacaaagctgcagatcacccggacagtggcggcgcccagtgtcttcatttttccccctagcgacgaacagctgaagtctgggacagccagtgtggtctgtctgctgaacaacttctaccctagagaggctaaagtgcagtggaaggtcgataacgcactgcagtccggaaattctcaggagagtgtgactgaacaggactcaaaagatagcacctattccctgtcaagcacactgactctgagcaaggccgactacgagaagcataaagtgtatgcttgtgaagtcacccaccaggggctgagttcaccagtcacaaaatcattcaacagaggggagtgc

SEQ ID NO: 299 - DNA, 1014 bp, Artificial Sequence
  CL_ 22092 full nt
gccttcaccgtgacagtgccaaaggatctgtacgtggtggagtatggcagcaacatgaccatcgagtgcaagttcccagtggagaagcagctggacctggccgccctgcaggtgttctggatgatggaggataagaatatcatccagtttgtgcacggcgaggaggacctgaaggtgcagcacagctcctaccggcagagagccaggctgctgaaggatcagctgtctctgggcaacgccgccctgcagatcaccgacgtgaagctgcaggatgccggggtgtacacatgcctgatcgcctacaagggagccgactataagcggatcaccgtgaaggtgaacgccgaggctgccgccaaggaggctgccgccaaggatatccagatgacacagtccccttctagcctgtctgccagcgtgggcgacagagtgaccatgacatgttccgcctcctctagcgtgtcttacatgaactggtatcagcagaagccaggcaaggcccccaagcggtggatctacgactcctctaagctggccagcggcgtgcccgcccggttttccggctctggcagcggcaccgattataccctgacaatcagctccctgcagcctgaggacttcgccacatactattgtcagcagtggtccagaaatccccctacctttggcggcggcacaaagctgcagatcaccaggacagtggcggcgcccagtgtcttcatttttccccctagcgacgaacagctgaagtctgggacagccagtgtggtctgtctgctgaacaacttctaccctagagaggctaaagtgcagtggaaggtcgataacgcactgcagtccggaaattctcaggagagtgtgactgaacaggactcaaaagatagcacctattccctgtcaagcacactgactctgagcaaggccgactacgagaagcataaagtgtatgcttgtgaagtcacccaccaggggctgagttcaccagtcacaaaatcattcaacagaggggagtgc

SEQ ID NO: 300 - DNA, 1023 bp, Artificial Sequence
  CL_ 22094 full nt
gccttcaccgtgacagtgccaaaggatctgtacgtggtggagtatggcagcaacatgacaatcgagtgcaagttcccagtggagaagcagctggacctggccgccctgatcgtgtactgggagatggaggataagaatatcatccagtttgtgcacggcgaggaggacctgaaggtgcagcacagctcctatcggcagagagccaggctgctgaaggatcagctgtctctgggcaacgccgccctgcagatcaccgacgtgaagctgcaggatgccggggtgtacagatgcatgatcagctacggcggagccgactataagcggatcaccgtgaaggtgaacgccgaggctgccgccaagatgagcggcagaagcgccaacgccgatatccagatgacacagtccccttctagcctgtctgccagcgtgggcgacagggtgaccatgacatgtagcgcctcctctagcgtgtcctacatgaactggtatcagcagaagccaggcaaggcccccaagagatggatctacgactcctctaagctggcctccggcgtgcccgccaggttctccggctctggcagcggcaccgattataccctgacaatcagctccctgcagcctgaggacttcgccacatactattgtcagcagtggtctcgcaatccccctacctttggcggcggcacaaagctgcagatcacccggacagtggcggcgcccagtgtcttcatttttccccctagcgacgaacagctgaagtctgggacagccagtgtggtctgtctgctgaacaacttctaccctagagaggctaaagtgcagtggaaggtcgataacgcactgcagtccggaaattctcaggagagtgtgactgaacaggactcaaaagatagcacctattccctgtcaagcacactgactctgagcaaggccgactacgagaagcataaagtgtatgcttgtgaagtcacccaccaggggctgagttcaccagtcacaaaatcattcaacagaggggagtgc

SEQ ID NO: 301 - DNA, 1038 bp, Artificial Sequence
  CL_ 22096 full nt
gccttcaccgtgacagtgccaaaggatctgtacgtggtggagtatggcagcaacatgacaatcgagtgcaagttcccagtggagaagcagctggacctggccgccctgatcgtgtactgggagatggaggataagaatatcatccagtttgtgcacggcgaggaggacctgaaggtgcagcacagctcctatcggcagagagccaggctgctgaaggatcagctgtctctgggcaacgccgccctgcagatcaccgacgtgaagctgcaggatgccggggtgtacagatgcatgatcagctacggcggagccgactataagcggatcacagtgaaggtgaacgccgaggctgccgccaaggaggctgccgccaagatgagcggcagaagcgccaacgccgatatccagatgacccagtccccttctagcctgtctgccagcgtgggcgacagggtgaccatgacatgtagcgcctcctctagcgtgtcctacatgaactggtatcagcagaagccaggcaaggcccccaagagatggatctacgactcctctaagctggcctccggcgtgcccgccaggttctccggctctggcagcggcaccgattataccctgacaatcagctccctgcagcctgaggacttcgccacatactattgtcagcagtggtctcgcaatccccctacctttggcggcggcacaaagctgcagatcacccggacagtggcggcgcccagtgtcttcatttttccccctagcgacgaacagctgaagtctgggacagccagtgtggtctgtctgctgaacaacttctaccctagagaggctaaagtgcagtggaaggtcgataacgcactgcagtccggaaattctcaggagagtgtgactgaacaggactcaaaagatagcacctattccctgtcaagcacactgactctgagcaaggccgactacgagaagcataaagtgtatgcttgtgaagtcacccaccaggggctgagttcaccagtcacaaaatcattcaacagaggggagtgc

SEQ ID NO: 302 - protein, 508 aa, Artificial Sequence
  CL_ 23571 full AA
EPKSSDKTHTCPPCPAPEAAGGPSVFLFPPKPKDTLMISRTPEVTCVVVSVSHEDPEVKFNWYVDGVEVHNAKTKPREEQYNSTYRVVSVLTVLHQDWLNGKEYKCKVSNKALPAPIEKTISKAKGQPREPQVYVLPPSRDELTKNQVSLLCLVKGFYPSDIAVEWESNGQPENNYLTWPPVLDSDGSFFLYSKLTVDKSRWQQGNVFSCSVMHEALHNHYTQKSLSLSPGGGGGSGGGGSMSGRSANAGGGGSGGGGSQVQLVESGGGVVQPGRSLRLSCAASGFTFSSYGMHWVRQAPGKGLEWVAFIRYDGSNKYYADSVKGRFTISRDNSKNTLYLQMNSLRAEDTAVYYCKTHGSHDNWGQGTMVTVSSGGGGSGGGSGGGSGGGGSGGGGSQSVLTQPPSVSGAPGQRVTISCSGSRSNIGSNTVKWYQQLPGTAPKLLIYYNDQRPSGVPDRFSGSKSGTSASLAITGLQAEDEADYYCQSYDRYTHPALLFGTGTKVTVL

SEQ ID NO: 303 - protein, 503 aa, Artificial Sequence
  CL_ 24219 full AA
EPKSSDKTHTCPPCPAPEAAGGPSVFLFPPKPKDTLMISRTPEVTCVVVSVSHEDPEVKFNWYVDGVEVHNAKTKPREEQYNSTYRVVSVLTVLHQDWLNGKEYKCKVSNKALPAPIEKTISKAKGQPREPQVYVLPPSRDELTKNQVSLLCLVKGFYPSDIAVEWESNGQPENNYLTWPPVLDSDGSFFLYSKLTVDKSRWQQGNVFSCSVMHEALHNHYTQKSLSLSPGGGGGSGGGGSMSGRSANAGGGGSQVQLVESGGGVVQPGRSLRLSCAASGFTFSSYGMHWVRQAPGKGLEWVAFIRYDGSNKYYADSVKGRFTISRDNSKNTLYLQMNSLRAEDTAVYYCKTHGSHDNWGQGTMVTVSSGGGGSMSGRSANAGGGGSGGGGSQSVLTQPPSVSGAPGQRVTISCSGSRSNIGSNTVKWYQQLPGTAPKLLIYYNDQRPSGVPDRFSGSKSGTSASLAITGLQAEDEADYYCQSYDRYTHPALLFGTGTKVTVL

SEQ ID NO: 304 - protein, 498 aa, Artificial Sequence
  CL_ 24221 full AA
EPKSSDKTHTCPPCPAPEAAGGPSVFLFPPKPKDTLMISRTPEVTCVVVSVSHEDPEVKFNWYVDGVEVHNAKTKPREEQYNSTYRVVSVLTVLHQDWLNGKEYKCKVSNKALPAPIEKTISKAKGQPREPQVYVLPPSRDELTKNQVSLLCLVKGFYPSDIAVEWESNGQPENNYLTWPPVLDSDGSFFLYSKLTVDKSRWQQGNVFSCSVMHEALHNHYTQKSLSLSPGGGGGSMSGRSANAGGGGSQVQLVESGGGVVQPGRSLRLSCAASGFTFSSYGMHWVRQAPGKGLEWVAFIRYDGSNKYYADSVKGRFTISRDNSKNTLYLQMNSLRAEDTAVYYCKTHGSHDNWGQGTMVTVSSGGGGSMSGRSANAGGGGSGGGGSQSVLTQPPSVSGAPGQRVTISCSGSRSNIGSNTVKWYQQLPGTAPKLLIYYNDQRPSGVPDRFSGSKSGTSASLAITGLQAEDEADYYCQSYDRYTHPALLFGTGTKVTVL

SEQ ID NO: 305 - protein, 494 aa, Artificial Sequence
  CL_ 24222 full AA
EPKSSDKTHTCPPCPAPEAAGGPSVFLFPPKPKDTLMISRTPEVTCVVVSVSHEDPEVKFNWYVDGVEVHNAKTKPREEQYNSTYRVVSVLTVLHQDWLNGKEYKCKVSNKALPAPIEKTISKAKGQPREPQVYVLPPSRDELTKNQVSLLCLVKGFYPSDIAVEWESNGQPENNYLTWPPVLDSDGSFFLYSKLTVDKSRWQQGNVFSCSVMHEALHNHYTQKSLSLSPGGGSMSGRSANAGGSQVQLVESGGGVVQPGRSLRLSCAASGFTFSSYGMHWVRQAPGKGLEWVAFIRYDGSNKYYADSVKGRFTISRDNSKNTLYLQMNSLRAEDTAVYYCKTHGSHDNWGQGTMVTVSSGGGGSMSGRSANAGGGGSGGGGSQSVLTQPPSVSGAPGQRVTISCSGSRSNIGSNTVKWYQQLPGTAPKLLIYYNDQRPSGVPDRFSGSKSGTSASLAITGLQAEDEADYYCQSYDRYTHPALLFGTGTKVTVL

SEQ ID NO: 306 - protein, 505 aa, Artificial Sequence
  CL_ 24224 full AA
EPKSSDKTHTCPPCPAPEAAGGPSVFLFPPKPKDTLMISRTPEVTCVVVSVSHEDPEVKFNWYVDGVEVHNAKTKPREEQYNSTYRVVSVLTVLHQDWLNGKEYKCKVSNKALPAPIEKTISKAKGQPREPQVYVLPPSRDELTKNQVSLLCLVKGFYPSDIAVEWESNGQPENNYLTWPPVLDSDGSFFLYSKLTVDKSRWQQGNVFSCSVMHEALHNHYTQKSLSLSPGGGGGSGGGGSMSGRSANAGGGGSGGGGSQVQLVESGGGVVQPGRSLRLSCAASGFTFSSYGMHWVRQAPGKGLEWVAFIRYDGSNKYYADSVKGRFTISRDNSKNTLYLQMNSLRAEDTAVYYCKTHGSHDNWGQGTMVTVSSGGSGGGSGGGSGGGSGGGSGQSVLTQPPSVSGAPGQRVTISCSGSRSNIGSNTVKWYQQLPGTAPKLLIYYNDQRPSGVPDRFSGSKSGTSASLAITGLQAEDEADYYCQSYDRYTHPALLFGTGTKVTVL

SEQ ID NO: 307 - protein, 503 aa, Artificial Sequence
  CL_ 24308 full AA
EPKSSDKTHTCPPCPAPEAAGGPSVFLFPPKPKDTLMISRTPEVTCVVVSVSHEDPEVKFNWYVDGVEVHNAKTKPREEQYNSTYRVVSVLTVLHQDWLNGKEYKCKVSNKALPAPIEKTISKAKGQPREPQVYVLPPSRDELTKNQVSLLCLVKGFYPSDIAVEWESNGQPENNYLTWPPVLDSDGSFFLYSKLTVDKSRWQQGNVFSCSVMHEALHNHYTQKSLSLSPGGGGGSMSGRSANAGGGGSGGGGSQVQLVESGGGVVQPGRSLRLSCAASGFTFSSYGMHWVRQAPGKGLEWVAFIRYDGSNKYYADSVKGRFTISRDNSKNTLYLQMNSLRAEDTAVYYCKTHGSHDNWGQGTMVTVSSGGGGSMSGRSANAGGGGSGGGGSQSVLTQPPSVSGAPGQRVTISCSGSRSNIGSNTVKWYQQLPGTAPKLLIYYNDQRPSGVPDRFSGSKSGTSASLAITGLQAEDEADYYCQSYDRYTHPALLFGTGTKVTVL

SEQ ID NO: 308 - protein, 754 aa, Artificial Sequence
  CL_ 24831 full AA
EPKSSDKTHTCPPCPAPEAAGGPSVFLFPPKPKDTLMISRTPEVTCVVVSVSHEDPEVKFNWYVDGVEVHNAKTKPREEQYNSTYRVVSVLTVLHQDWLNGKEYKCKVSNKALPAPIEKTISKAKGQPREPQVYVYPPSRDELTKNQVSLTCLVKGFYPSDIAVEWESNGQPENNYKTTPPVLDSDGSFALVSKLTVDKSRWQQGNVFSCSVMHEALHNHYTQKSLSLSPGGSADGGIWELKKDVYVVELDWYPDAPGEMVVLTCDTPEEDGITWTLDQSSEVLGSGKTLTIQVKEFGDAGQYTCHKGGEVLSHSLLLLHKKEDGIWSTDILKDQKEPKNKTFLRCEAKNYSGRFTCWWLTTISTDLTFSVKSSRGSSDPQGVTCGAATLSAERVRGDNKEYEYSVECQEDVACPTAEETLPIEVMVDAVHKLKYENYTSSFFIRDIIKPDPPKNLQLKPLKNSRQVEVSWEYPDTWSTPHSYFSLTFCVQVQGKSKREKKDRVFTDKTSATVICRKNASISVRAQDRYYNSSWSEWASVPCSGGGGSGGGGSGGGGSNLPVATPDPGMFPCLHHSQNLLRAVSNMLQKARQTLEFYPCTSEEIDHEDITKDKTSTVEACLPLELTKNESCLNSRETSFITNGSCLASRKTSFMMALCLSSIYEDLKMYQVEFKTMNAKLLMDPKRQIFLDQNMLAVIDELMQALNFNSETVPQKSSLEEPDFYKTKIKLCILLHAFRIRAVTIDRVMSYLNAS

SEQ ID NO: 309 - protein, 754 aa, Artificial Sequence
  CL_ 24832 full AA
EPKSSDKTHTCPPCPAPEAAGGPSVFLFPPKPKDTLMISRTPEVTCVVVSVSHEDPEVKFNWYVDGVEVHNAKTKPREEQYNSTYRVVSVLTVLHQDWLNGKEYKCKVSNKALPAPIEKTISKAKGQPREPQVYVYPPSRDELTKNQVSLTCLVKGFYPSDIAVEWESNGQPENNYKTTPPVLDSDGSFALVSKLTVDKSRWQQGNVFSCSVMHEALHNHYTQKSLSLSPGGSADGGIWELKKDVYVVELDWYPDAPGEMVVLTCDTPEEDGITWTLDQSSEVLGSGKTLTIQVKEFGDAGQYTCHKGGEVLSHSLLLLHKKEDGIWSTDILKDQKEPKNKTFLRCEAKNYSGRFTCWWLTTISTDLTFSVKSSRGSSDPQGVTCGAATLSAERVRGDNKEYEYSVECQEDSACPAAEESLPIEVMVDAVHKLKYENYTSSFFIRDIIKPDPPKNLQLKPLKNSRQVEVSWEYPDTWSTPHSYFSLTFCVQVQGKSKREKKDRVFTDKTSATVICRKNASISVRAQDRYYSSSWSEWASVPCSGGGGSGGGGSGGGGSNLPVATPDPGMFPCLHHSQNLLRAVSNMLQKARQTLEFYPCTSEEIDHEDITKDKTSTVEACLPLEATKNESCLNSRETSFITNGSCLASRKTSFMMALCLSSIYEDLKMYQVEFKTMNAKLLMDPKRQIFLDQNMLAVIDELMQALNFNSETVPQKSSLEEPDFYKTKIKLCILLHAFRIRAVTIDRVMSYLNAS

SEQ ID NO: 310 - protein, 754 aa, Artificial Sequence
  CL_ 24833 full AA
EPKSSDKTHTCPPCPAPEAAGGPSVFLFPPKPKDTLMISRTPEVTCVVVSVSHEDPEVKFNWYVDGVEVHNAKTKPREEQYNSTYRVVSVLTVLHQDWLNGKEYKCKVSNKALPAPIEKTISKAKGQPREPQVYVYPPSRDELTKNQVSLTCLVKGFYPSDIAVEWESNGQPENNYKTTPPVLDSDGSFALVSKLTVDKSRWQQGNVFSCSVMHEALHNHYTQKSLSLSPGGSADGGIWELKKDVYVVELDWYPDAPGEMVVLTCDTPEEDGITWTLDQSSEVLGSGKTLTIQVKEFGDAGQYTCHKGGEVLSHSLLLLHKKEDGIWSTDILKDQKEPKNKTFLRCEAKNYSGRFTCWWLTTISTDLTFSVKSSRGSSDPQGVTCGAATLSAERVRGDNKEYEYSVECQEDSACPAAEESLPIEVMVDAVHKLKYENYTSSFFIRDIIKPDPPKNLQLKPLKNSRQVEVSWEYPDTWSTPHSYFSLTFCVQVQGKSKREKKDRVFTDKTSATVICRKNASISVRAQDRYYSSSWSEWASVPCSGGGGSGGGGSGGGGSNLPVATPDPGMFPCLHHSQNLLRAVSNMLQKARQTLEFYPCTSEEIDHEDITKDKTSTVEACLPLELTKNESCLNSRETSFITNGSCLASRKTSFMMALCLSSIYEDLKMYQVEFKTMNAKLLMDPKRQIFLDQNMLAVIDELMQALNFNSETVPQKSSLEEPDFYKTKIKLCILLHAFAIRAVTIDRVMSYLNAS

SEQ ID NO: 311 - protein, 754 aa, Artificial Sequence
  CL_ 24834 full AA
EPKSSDKTHTCPPCPAPEAAGGPSVFLFPPKPKDTLMISRTPEVTCVVVSVSHEDPEVKFNWYVDGVEVHNAKTKPREEQYNSTYRVVSVLTVLHQDWLNGKEYKCKVSNKALPAPIEKTISKAKGQPREPQVYVYPPSRDELTKNQVSLTCLVKGFYPSDIAVEWESNGQPENNYKTTPPVLDSDGSFALVSKLTVDKSRWQQGNVFSCSVMHEALHNHYTQKSLSLSPGGSADGGIWELKKDVYVVELDWYPDAPGEMVVLTCDTPEEDGITWTLDQSSEVLGSGKTLTIQVKEFGDAGQYTCHKGGEVLSHSLLLLHKKEDGIWSTDILKDQKEPKNKTFLRCEAKNYSGRFTCWWLTTISTDLTFSVKSSRGSSDPQGVTCGAATLSAERVRGDNKEYEYSVECQEDSACPAAEESLPIEVMVDAVHKLKYENYTSSFFIRDIIKPDPPKNLQLKPLKNSRQVEVSWEYPDTWSTPHSYFSLTFCVQVQGKSKREKKDRVFTDKTSATVICRKNASISVRAQDRYYSSSWSEWASVPCSGGGGSGGGGSGGGGSNLPVATPDPGMFPCLHHSQNLLRAVSNMLQKARQTLEFYPCTSEEIDHEDITKDKTSTVEACLPLELTKNESCLNSRETSFITNGSCLASRKTSFMMALCLSSIYEDLKMYQVEFKTMNAKLLMDPKRQIFLDQNMLAVIDELMQALNFNSETVPQKSSLEEPDFYKTKIKLCILLHAFRIRAATIDRVMSYLNAS

SEQ ID NO: 312 - protein, 754 aa, Artificial Sequence
  CL_ 24835 full AA
EPKSSDKTHTCPPCPAPEAAGGPSVFLFPPKPKDTLMISRTPEVTCVVVSVSHEDPEVKFNWYVDGVEVHNAKTKPREEQYNSTYRVVSVLTVLHQDWLNGKEYKCKVSNKALPAPIEKTISKAKGQPREPQVYVYPPSRDELTKNQVSLTCLVKGFYPSDIAVEWESNGQPENNYKTTPPVLDSDGSFALVSKLTVDKSRWQQGNVFSCSVMHEALHNHYTQKSLSLSPGGSADGGIWELKKDVYVVELDWYPDAPGEMVVLTCDTPEEDGITWTLDQSSEVLGSGKTLTIQVKEFGDAGQYTCHKGGEVLSHSLLLLHKKEDGIWSTDILKDQKEPKNKTFLRCEAKNYSGRFTCWWLTTISTDLTFSVKSSRGSSDPQGVTCGAATLSAERVRGDNKEYEYSVECQEDSACPAAEESLPIEVMVDAVHKLKYENYTSSFFIRDIIKPDPPKNLQLKPLKNSRQVEVSWEYPDTWSTPHSYFSLTFCVQVQGKSKREKKDRVFTDKTSATVICRKNASISVRAQDRYYSSSWSEWASVPCSGGGGSGGGGSGGGGSNLPVATPDPGMFPCLHHSQNLLRAVSNMLQKARQTLRFYPCTSEEIDHEDITKDKTSTVEACLPLELTKNESCLNSRETSFITNGSCLASRKTSFMMALCLSSIYEDLKMYQVEFKTMNAKLLMDPERQIFLDQNMLAVIDELMQALNFNSETVPQKSSLEEPDFYETKIKLCILLHAFRIRAVTIDRVMSYLNAS

SEQ ID NO: 313 - protein, 754 aa, Artificial Sequence
  CL_ 24836 full AA
EPKSSDKTHTCPPCPAPEAAGGPSVFLFPPKPKDTLMISRTPEVTCVVVSVSHEDPEVKFNWYVDGVEVHNAKTKPREEQYNSTYRVVSVLTVLHQDWLNGKEYKCKVSNKALPAPIEKTISKAKGQPREPQVYVYPPSRDELTKNQVSLTCLVKGFYPSDIAVEWESNGQPENNYKTTPPVLDSDGSFALVSKLTVDKSRWQQGNVFSCSVMHEALHNHYTQKSLSLSPGGSADGGIWELKKDVYVVELDWYPDAPGEMVVLTCDTPEEDGITWTLDQSSEVLGSGKTLTIQVKEFGDAGQYTCHKGGEVLSHSLLLLHKKEDGIWSTDILKDQKEPKNKTFLRCEAKNYSGRFTCWWLTTISTDLTFSVKSSRGSSDPQGVTCGAATLSAERVRGDNKEYEYSVECQEDSACPAAEESLPIEVMVDAVHKLKYENYTSSFFIRDIIKPDPPKNLQLKPLKNSRQVEVSWEYPDTWSTPHSYFSLTFCVQVQGKSKREKKDRVFTDKTSATVICRKNASISVRAQDRYYSSSWSEWASVPCSGGGGSGGGGSGGGGSNLPVATPDPGMFPCLHHSQNLLRAVSNMLQKARQTLEFYSCTSEEIDHEDITKDKTSTVEACLPLELTKNESCLNSRETSFITNGSCLASRKTSFMMALCLSSIYEDLKMYQVEFKTMNAKLLMDPKRQIFLDQNMLAVIDELMQALNFNSETVPQKSSLEEPDFYKTKQKLCSLLHAFRIRAVTIDRVMSYLNAS

SEQ ID NO: 314 - protein, 754 aa, Artificial Sequence
  CL_ 24837 full AA
EPKSSDKTHTCPPCPAPEAAGGPSVFLFPPKPKDTLMISRTPEVTCVVVSVSHEDPEVKFNWYVDGVEVHNAKTKPREEQYNSTYRVVSVLTVLHQDWLNGKEYKCKVSNKALPAPIEKTISKAKGQPREPQVYVYPPSRDELTKNQVSLTCLVKGFYPSDIAVEWESNGQPENNYKTTPPVLDSDGSFALVSKLTVDKSRWQQGNVFSCSVMHEALHNHYTQKSLSLSPGGSADGGIWELKKDVYVVELDWYPDAPGEMVVLTCDTPEEDGITWTLDQSSEVLGSGKTLTIQVKEFGDAGQYTCHKGGEVLSHSLLLLHKKEDGIWSTDILKDQKEPKNKTFLRCEAKNYSGRFTCWWLTTISTDLTFSVKSSRGSSDPQGVTCGAATLSAERVRGDNKEYEYSVECQEDSACPAAEESLPIEVMVDAVHKLKYENYTSSFFIRDIIKPDPPKNLQLKPLKNSRQVEVSWEYPDTWSTPHSYFSLTFCVQVQGKSKREKKDRVFTDKTSATVICRKNASISVRAQDRYYSSSWSEWASVPCSGGGGSGGGGSGGGGSNLPVATPDPGMFPCLHHSQNLLRAVSNMLQKARQTLESSPCTSEEIDHEDITKDKTSTVEACLPLELTKNESCLNSRETSFITNGSCLASRKTSFMMALCLSSIYEDLKMYQVEFKTMNAKLLMDPKRQIFLDQNMLAVIDELMQALNFNSETVPQKSSLEEPDFSKTKIKLCILLHAFRIRAVTIDRVMSYLNAS

SEQ ID NO: 315 - protein, 754 aa, Artificial Sequence
  CL_ 24838 full AA
EPKSSDKTHTCPPCPAPEAAGGPSVFLFPPKPKDTLMISRTPEVTCVVVSVSHEDPEVKFNWYVDGVEVHNAKTKPREEQYNSTYRVVSVLTVLHQDWLNGKEYKCKVSNKALPAPIEKTISKAKGQPREPQVYVYPPSRDELTKNQVSLTCLVKGFYPSDIAVEWESNGQPENNYKTTPPVLDSDGSFALVSKLTVDKSRWQQGNVFSCSVMHEALHNHYTQKSLSLSPGGSADGGIWELKKDVYVVELDWYPDAPGEMVVLTCDTPEEDGITWTLDQSSEVLGSGKTLTIQVKEFGDAGQYTCHKGGEVLSHSLLLLHKKEDGIWSTDILKDQKEPKNKTFLRCEAKNYSGRFTCWWLTTISTDLTFSVKSSRGSSDPQGVTCGAATLSAERVRGDNKEYEYSVECQEDSACPAAEESLPIEVMVDAVHKLKYENYTSSFFIRDIIKPDPPKNLQLKPLKNSRQVEVSWEYPDTWSTPHSYFSLTFCVQVQGKSKREKKDRVFTDKTSATVICRKNASISVRAQDRYYSSSWSEWASVPCSGGGGSGGGGSGGGGSNLPVATPDPGMFPCLHHSQNLLRAVSNMLQKARQTLEFYPCASRESRHEDITKDKTSTVEACLPLELTKNESCLNSRETSFITNGSCLASRKTSFMMALCLSSIYEDLKMYQVEFKTMNAKLLMDPKRQIFLDQNMLAVIDELMQALNFNSETVPQKSSLEEPDFYKTKIKLCILLHAFRIRAVTIDRVMSYLNAS

SEQ ID NO: 316 - protein, 754 aa, Artificial Sequence
  CL_ 24839 full AA
EPKSSDKTHTCPPCPAPEAAGGPSVFLFPPKPKDTLMISRTPEVTCVVVSVSHEDPEVKFNWYVDGVEVHNAKTKPREEQYNSTYRVVSVLTVLHQDWLNGKEYKCKVSNKALPAPIEKTISKAKGQPREPQVYVYPPSRDELTKNQVSLTCLVKGFYPSDIAVEWESNGQPENNYKTTPPVLDSDGSFALVSKLTVDKSRWQQGNVFSCSVMHEALHNHYTQKSLSLSPGGSADGGIWELKKDVYVVELDWYPDAPGEMVVLTCDTPEEDGITWTLDQSSEVLGSGKTLTIQVKEFGDAGQYTCHKGGEVLSHSLLLLHKKEDGIWSTDILKDQKEPKNKTFLRCEAKNYSGRFTCWWLTTISTDLTFSVKSSRGSSDPQGVTCGAATLSAERVRGDNKEYEYSVECQEDSACPAAEESLPIEVMVDAVHKLKYENYTSSFFIRDIIKPDPPKNLQLKPLKNSRQVEVSWEYPDTWSTPHSYFSLTFCVQVQGKSKREKKDRVFTDKTSATVICRKNASISVRAQDRYYSSSWSEWASVPCSGGGGSGGGGSGGGGSNLPVATPDPGMFPCLHHSQNLLRAVSNMLQKARQTLEFYPCASRKSRHKDITKDKTSTVEACLPLELTKNESCLNSRETSFITNGSCLASRKTSFMMALCLSSIYEDLKMYQVEFKTMNAKLLMDPKRQIFLDQNMLAVIDELMQALNFNSETVPQKSSLEEPDFYKTKIKLCILLHAFRIRAVTIDRVMSYLNAS

SEQ ID NO: 317 - protein, 754 aa, Artificial Sequence
  CL_ 24840 full AA
EPKSSDKTHTCPPCPAPEAAGGPSVFLFPPKPKDTLMISRTPEVTCVVVSVSHEDPEVKFNWYVDGVEVHNAKTKPREEQYNSTYRVVSVLTVLHQDWLNGKEYKCKVSNKALPAPIEKTISKAKGQPREPQVYVYPPSRDELTKNQVSLTCLVKGFYPSDIAVEWESNGQPENNYKTTPPVLDSDGSFALVSKLTVDKSRWQQGNVFSCSVMHEALHNHYTQKSLSLSPGGSADGGIWELKKDVYVVELDWYPDAPGEMVVLTCDTPEEDGITWTLSQSSRVLGSGKTLTIQVSSFGDAGQYTCHKGGEVLSHSLLLLHKKEDGIWSTDILKDQKEPKNKTFLRCEAKNYSGRFTCWWLTTISTDLTFSVKSSRGSSDPQGVTCGAATLSAERVRGDNKEYEYSVECQEDSACPAAEESLPIEVMVDAVHDLKYENYTSSFFIRDIIKPDPPKNLQLKPLKNSRQVEVSWEYPDTWSTPHSYFSLTFCVQVQGKSKREKKDRVFTDKTSATVICRKNASISVRAQDRYYSSSWSEWASVPCSGGGGSGGGGSGGGGSNLPVATPDPGMFPCLHHSQNLLRAVSNMLQKARQTLEFYPCTSEEIDHEDITKDKTSTVEACLPLELTKNESCLNSRETSFITNGSCLASRKTSFMMALCLSSIYEDLKMYQVEFKTMNAKLLMDPKRQIFLDQNMLAVIDELMQALNFNSETVPQKSSLEEPDFYKTKIKLCILLHAFRIRAVTIDRVMSYLNAS

SEQ ID NO: 318 - protein, 754 aa, Artificial Sequence
  CL_ 24841 full AA
EPKSSDKTHTCPPCPAPEAAGGPSVFLFPPKPKDTLMISRTPEVTCVVVSVSHEDPEVKFNWYVDGVEVHNAKTKPREEQYNSTYRVVSVLTVLHQDWLNGKEYKCKVSNKALPAPIEKTISKAKGQPREPQVYVYPPSRDELTKNQVSLTCLVKGFYPSDIAVEWESNGQPENNYKTTPPVLDSDGSFALVSKLTVDKSRWQQGNVFSCSVMHEALHNHYTQKSLSLSPGGSADGGIWELKKDVYVVELDWYPDAPGEMVVLTCDTPEEDGITWTLDQSSEVLGSGKTLTIQVKEFGDAGQYTCHKGGEVLSHSLLLLHKKEDGIWSTDILKDQSSPKNKTFLRCEAKNYSGRFTCWWLTTISTDLTFSVKSSRGSSDPQGVTCGAATLSAERVSGDNKEYEYSVECQEDSACPAAEESLPIEVMVDAVHKLKYENYTSSFFIRDIIKPDPPKNLQLKPLKNSRQVEVSWEYPDTWSTPHSYFSLTFCVQVQGKSKREKKDRVFTDKTSATVICRKNASISVRAQDRYYSSSWSEWASVPCSGGGGSGGGGSGGGGSNLPVATPDPGMFPCLHHSQNLLRAVSNMLQKARQTLEFYPCTSEEIDHEDITKDKTSTVEACLPLELTKNESCLNSRETSFITNGSCLASRKTSFMMALCLSSIYEDLKMYQVEFKTMNAKLLMDPKRQIFLDQNMLAVIDELMQALNFNSETVPQKSSLEEPDFYKTKIKLCILLHAFRIRAVTIDRVMSYLNAS

SEQ ID NO: 319 - protein, 754 aa, Artificial Sequence
  CL_ 24842 full AA
EPKSSDKTHTCPPCPAPEAAGGPSVFLFPPKPKDTLMISRTPEVTCVVVSVSHEDPEVKFNWYVDGVEVHNAKTKPREEQYNSTYRVVSVLTVLHQDWLNGKEYKCKVSNKALPAPIEKTISKAKGQPREPQVYVYPPSRDELTKNQVSLTCLVKGFYPSDIAVEWESNGQPENNYKTTPPVLDSDGSFALVSKLTVDKSRWQQGNVFSCSVMHEALHNHYTQKSLSLSPGGSADGGIWELKKDVYVVELDWYPDAPGEMVVLTCDTPEEDGITWTLDQSSEVLGSGKTLTIQVKEFGDAGQYTCHKGGEVLSHSLLLLHKKEDGIWSTDILKDQKEPKNKTFLRCEAKNYSGRFTCWWLTTISTDLTFSVKSSRGSSDPQGVTCGAATLSAERVRGDNKEYEYSVECQEDSACPAAEESLPISVMVDAVHKLKYENYSSRFFIRDIIKPDPPKNLQLKPLKNSRQVEVSWEYPDTWSTPHSYFSLTFCVQVQGKSKREKKDRVFTDKTSATVICRKNASISVRAQDRYYSSSWSEWASVPCSGGGGSGGGGSGGGGSNLPVATPDPGMFPCLHHSQNLLRAVSNMLQKARQTLEFYPCTSEEIDHEDITKDKTSTVEACLPLELTKNESCLNSRETSFITNGSCLASRKTSFMMALCLSSIYEDLKMYQVEFKTMNAKLLMDPKRQIFLDQNMLAVIDELMQALNFNSETVPQKSSLEEPDFYKTKIKLCILLHAFRIRAVTIDRVMSYLNAS

SEQ ID NO: 320 - protein, 505 aa, Artificial Sequence
  CL_ 26498 full AA
EPKSSDKTHTCPPCPAPEAAGGPSVFLFPPKPKDTLMISRTPEVTCVVVSVSHEDPEVKFNWYVDGVEVHNAKTKPREEQYNSTYRVVSVLTVLHQDWLNGKEYKCKVSNKALPAPIEKTISKAKGQPREPQVYVLPPSRDELTKNQVSLLCLVKGFYPSDIAVEWESNGQPENNYLTWPPVLDSDGSFFLYSKLTVDKSRWQQGNVFSCSVMHEALHNHYTQKSLSLSPGGGGGSGGGGSMSGRSANAGGGGSGGGGSQVQLVESGGGVVQPGRSLRLSCAASGVTFSSYGMHWVRQAPGKGLEWVAFIRYDGSNKYYADSVKGRFTISRDNSKNTLYLQMNSLRAEDTAVYYCKTHGSHDNWGQGTMVTVSSGGSGGGSGGGSGGGSGGGSGQSVLTQPPSVSGAPGQRVTISCSGSRSNIGSNTVKWYQQLPGTAPKLLIYYNDQRPSGVPDRFSGSKSGTSASLAITGLQAEDEADYYCQSYDRYTHPALLFGTGTKVTVL

SEQ ID NO: 321 - DNA, 1524 bp, Artificial Sequence
  CL_ 23571 full nt
gagccaaagagctccgacaagacccacacatgccccccttgtccggcgccagaggcagcaggaggaccaagcgtgttcctgtttccacccaagcccaaagacaccctgatgattagccgaacccctgaagtcacatgcgtggtcgtgtccgtgtctcacgaggacccagaagtcaagttcaactggtacgtggatggcgtcgaggtgcataatgccaagacaaaaccccgggaggaacagtacaacagcacctatagagtcgtgtccgtcctgacagtgctgcaccaggattggctgaacggcaaggaatataagtgcaaagtgtccaataaggccctgcccgctcctatcgagaaaaccatttctaaggcaaaaggccagcctcgcgagcctcaggtgtacgtgctgccaccttcccgcgacgagctgaccaagaatcaggtgtctctgctgtgcctggtgaagggcttctatccaagcgatatcgcagtggagtgggagtccaacggacagcccgagaacaattacctgacctggccacccgtgctggacagcgatggctccttctttctgtattccaagctgacagtggacaagtctagatggcagcagggcaacgtgttcagctgttccgtgatgcacgaggccctgcacaaccactacacccagaagtctctgagcttaagccctggaggaggaggaggctctggaggaggaggctccatgagcgggcggagcgccaacgcagggggcggcggctctggcggcggcggcagccaggtgcagctggtggagagcggcggcggcgtggtgcagcccggcagaagcctgcggctgagctgcgcagcctctggcttcacctttagctcctacggcatgcactgggtgcggcaggcccctggcaagggactggagtgggtggccttcatcagatatgacggctccaataagtactatgccgattctgtgaagggcaggtttaccatcagccgcgacaactccaagaatacactgtacctgcagatgaactccctgagggccgaggacaccgccgtgtactattgcaagacacacggctctcacgataattggggccagggcaccatggtgacagtgtcttccggaggaggaggcagcggcggcgggagcggcggcggcagcgggggtggaggctccggaggaggaggctctcagagcgtgctgacccagccaccttccgtgtctggagcccccggacagagggtgacaatcagctgttccggctctcgcagcaacatcggcagcaataccgtgaagtggtatcagcagctgccaggcacagcccccaagctgctgatctactataatgaccagcggccttccggcgtgccagatagattctccggctctaagagcggcacctccgcctctctggccatcacaggcctgcaggcagaggacgaggcagattactattgtcagtcctacgatagatatacccaccccgccctgctgtttggcaccggcacaaaggtgacagtgctg

SEQ ID NO: 322 - DNA, 1509 bp, Artificial Sequence
  CL_ 24219 full nt
gagccaaagagctccgacaagacccacacatgccccccttgtccggcgccagaggcagcaggaggaccaagcgtgttcctgtttccacccaagcccaaagacaccctgatgattagccgaacccctgaagtcacatgcgtggtcgtgtccgtgtctcacgaggacccagaagtcaagttcaactggtacgtggatggcgtcgaggtgcataatgccaagacaaaaccccgggaggaacagtacaacagcacctatagagtcgtgtccgtcctgacagtgctgcaccaggattggctgaacggcaaggaatataagtgcaaagtgtccaataaggccctgcccgctcctatcgagaaaaccatttctaaggcaaaaggccagcctcgcgagcctcaggtgtacgtgctgccaccttcccgcgacgagctgaccaagaatcaggtgtctctgctgtgcctggtgaagggcttctatccaagcgatatcgcagtggagtgggagtccaacggacagcccgagaacaattacctgacctggccacccgtgctggacagcgatggctccttctttctgtattccaagctgacagtggacaagtctagatggcagcagggcaacgtgttcagctgttccgtgatgcacgaggccctgcacaaccactacacccagaagtctctgagcttaagccctggaggaggaggaggctctggaggaggaggctccatgagcgggcggagcgccaacgcagggggcggcggctctcaggtgcagctggtggagagcggaggaggagtggtgcagcccggcagaagcctgcggctgagctgcgcagcctctggcttcacctttagctcctacggcatgcactgggtgcggcaggcccctggcaagggactggagtgggtggccttcatcagatatgacggctccaataagtactatgccgattctgtgaagggcaggtttaccatcagccgcgacaactccaagaatacactgtacctgcagatgaactccctgagggccgaggacaccgccgtgtactattgcaagacacacggctctcacgataattggggccagggcaccatggtgacagtgtcttccggaggaggaggcagcatgagcgggcggagcgccaacgcagggggtggaggctccggaggaggaggctctcagagcgtgctgacccagccaccttccgtgtctggagcccccggacagagggtgacaatcagctgttccggctctcgcagcaacatcggcagcaataccgtgaagtggtatcagcagctgccaggcacagcccccaagctgctgatctactataatgaccagcggccttccggcgtgccagatagattctccggctctaagagcggcacctccgcctctctggccatcacaggcctgcaggcagaggacgaggcagattactattgtcagagctacgatagatatacccaccccgccctgctgtttggcaccggcacaaaggtgacagtgctg

SEQ ID NO: 323 - DNA, 1494 bp, Artificial Sequence
  CL_ 24221 full nt
gagccaaagagctccgacaagacccacacatgccccccttgtccggcgccagaggcagcaggaggaccaagcgtgttcctgtttccacccaagcccaaagacaccctgatgattagccgaacccctgaagtcacatgcgtggtcgtgtccgtgtctcacgaggacccagaagtcaagttcaactggtacgtggatggcgtcgaggtgcataatgccaagacaaaaccccgggaggaacagtacaacagcacctatagagtcgtgtccgtcctgacagtgctgcaccaggattggctgaacggcaaggaatataagtgcaaagtgtccaataaggccctgcccgctcctatcgagaaaaccatttctaaggcaaaaggccagcctcgcgagcctcaggtgtacgtgctgccaccttcccgcgacgagctgaccaagaatcaggtgtctctgctgtgcctggtgaagggcttctatccaagcgatatcgcagtggagtgggagtccaacggacagcccgagaacaattacctgacctggccacccgtgctggacagcgatggctccttctttctgtattccaagctgacagtggacaagtctagatggcagcagggcaacgtgttcagctgttccgtgatgcacgaggccctgcacaaccactacacccagaagtctctgagcttaagccctggaggaggaggaggctccatgagcgggcggagcgccaacgcagggggcggcggctctcaggtgcagctggtggagagcggaggaggagtggtgcagcccggcagaagcctgcggctgagctgcgcagcctctggcttcacctttagctcctacggcatgcactgggtgcggcaggcccctggcaagggactggagtgggtggccttcatcagatatgacggctccaataagtactatgccgattctgtgaagggcaggtttaccatcagccgcgacaactccaagaatacactgtacctgcagatgaactctctgagggccgaggacaccgccgtgtactattgcaagacacacggctcccacgataattggggccagggcaccatggtgacagtgtcttccggaggaggaggcagcatgagcgggcggagcgccaacgcagggggtggaggctccggaggaggaggctctcagagcgtgctgacccagccaccttccgtgtctggagcccccggacagagggtgacaatcagctgttccggctctcgcagcaacatcggcagcaataccgtgaagtggtatcagcagctgccaggcacagcccccaagctgctgatctactataatgaccagcggccttccggcgtgccagatagattctccggctctaagagcggcacctccgcctctctggccatcacaggcctgcaggcagaggacgaggcagattactattgtcagagctacgatagatatacccaccccgccctgctgtttggcaccggcacaaaggtgacagtgctg

SEQ ID NO: 324 - DNA, 1482 bp, Artificial Sequence
  CL_ 24222 full nt
gagccaaagagctccgacaagacccacacatgccccccttgtccggcgccagaggcagcaggaggaccaagcgtgttcctgtttccacccaagcccaaagacaccctgatgattagccgaacccctgaagtcacatgcgtggtcgtgtccgtgtctcacgaggacccagaagtcaagttcaactggtacgtggatggcgtcgaggtgcataatgccaagacaaaaccccgggaggaacagtacaacagcacctatagagtcgtgtccgtcctgacagtgctgcaccaggattggctgaacggcaaggaatataagtgcaaagtgtccaataaggccctgcccgctcctatcgagaaaaccatttctaaggcaaaaggccagcctcgcgagcctcaggtgtacgtgctgccaccttcccgcgacgagctgaccaagaatcaggtgtctctgctgtgcctggtgaagggcttctatccaagcgatatcgcagtggagtgggagtccaacggacagcccgagaacaattacctgacctggccacccgtgctggacagcgatggctccttctttctgtattccaagctgacagtggacaagtctagatggcagcagggcaacgtgttcagctgttccgtgatgcacgaggccctgcacaaccactacacccagaagtctctgagcttaagccctggaggaggctccatgagcgggcggagcgccaacgcagggggcagccaggtgcagctggtggagagcggaggaggagtggtgcagcccggcagaagcctgcggctgagctgcgcagcctctggcttcacctttagctcctacggcatgcactgggtgcggcaggcccctggcaagggactggagtgggtggccttcatcagatatgacggctccaataagtactatgccgattctgtgaagggcaggtttaccatcagccgcgacaactccaagaatacactgtacctgcagatgaactctctgagggccgaggacaccgccgtgtactattgcaagacacacggctcccacgataattggggccagggcaccatggtgacagtgtctagcggaggaggaggcagcatgagcgggcggagcgccaacgcagggggtggaggctccggaggaggaggctctcagagcgtgctgacccagccaccttccgtgtctggagcccccggacagagggtgacaatcagctgttccggctctcgcagcaacatcggcagcaataccgtgaagtggtatcagcagctgccaggcacagcccccaagctgctgatctactataatgaccagcggccttccggcgtgccagatagattctccggctctaagagcggcacctccgcctctctggccatcacaggcctgcaggcagaggacgaggcagattactattgtcagagctacgatagatatacccaccccgccctgctgtttggcaccggcacaaaggtgacagtgctg

SEQ ID NO: 325 - DNA, 1515 bp, Artificial Sequence
  CL_ 24224 full nt
gagccaaagagctccgacaagacccacacatgccccccttgtccggcgccagaggcagcaggaggaccaagcgtgttcctgtttccacccaagcccaaagacaccctgatgattagccgaacccctgaagtcacatgcgtggtcgtgtccgtgtctcacgaggacccagaagtcaagttcaactggtacgtggatggcgtcgaggtgcataatgccaagacaaaaccccgggaggaacagtacaacagcacctatagagtcgtgtccgtcctgacagtgctgcaccaggattggctgaacggcaaggaatataagtgcaaagtgtccaataaggccctgcccgctcctatcgagaaaaccatttctaaggcaaaaggccagcctcgcgagcctcaggtgtacgtgctgccaccttcccgcgacgagctgaccaagaatcaggtgtctctgctgtgcctggtgaagggcttctatccaagcgatatcgcagtggagtgggagtccaacggacagcccgagaacaattacctgacctggccacccgtgctggacagcgatggctccttctttctgtattccaagctgacagtggacaagtctagatggcagcagggcaacgtgttcagctgttccgtgatgcacgaggccctgcacaaccactacacccagaagtctctgagcttaagccctggaggaggaggaggctctggaggaggaggctccatgagcgggcggagcgccaacgcagggggcggcggctccggcggcggcggctctcaggtgcagctggtggagagcggaggaggagtggtgcagcccggcagaagcctgcggctgagctgcgcagccagcggcttcacctttagctcctacggcatgcactgggtgcggcaggcccctggcaagggactggagtgggtggccttcatcagatatgacggcagcaataagtactatgccgattccgtgaagggcaggtttaccatctcccgcgacaactctaagaatacactgtacctgcagatgaactccctgcgcgcagaggacaccgccgtgtactattgcaagacacacggctctcacgataattggggccagggcaccatggtgacagtgtctagcggaggcagcggaggaggctccggaggaggctctggcggcggcagcggcggcggctctggacagagcgtgctgacccagccacctagcgtgtccggagcccccggccagagggtgacaatctcttgtagcggctcccgctctaacatcggcagcaataccgtgaagtggtatcagcagctgccaggcacagcccccaagctgctgatctactataacgaccagcggccttccggcgtgccagatagattcagcggctccaagtctggcaccagcgcctccctggccatcacaggcctgcaggcagaggacgaggcagattactattgtcagtcctacgatcggtatacccaccccgccctgctgtttggcaccggcacaaaggtgacagtgctg

SEQ ID NO: 326 - DNA, 1509 bp, Artificial Sequence
  CL_ 24308 full nt
gagccaaagagctccgacaagacccacacatgccccccttgtccggcgccagaggcagcaggaggaccaagcgtgttcctgtttccacccaagcccaaagacaccctgatgattagccgaacccctgaagtcacatgcgtggtcgtgtccgtgtctcacgaggacccagaagtcaagttcaactggtacgtggatggcgtcgaggtgcataatgccaagacaaaaccccgggaggaacagtacaacagcacctatagagtcgtgtccgtcctgacagtgctgcaccaggattggctgaacggcaaggaatataagtgcaaagtgtccaataaggccctgcccgctcctatcgagaaaaccatttctaaggcaaaaggccagcctcgcgagcctcaggtgtacgtgctgccaccttcccgcgacgagctgaccaagaatcaggtgtctctgctgtgcctggtgaagggcttctatccaagcgatatcgcagtggagtgggagtccaacggacagcccgagaacaattacctgacctggccacccgtgctggacagcgatggctccttctttctgtattccaagctgacagtggacaagtctagatggcagcagggcaacgtgttcagctgttccgtgatgcacgaggccctgcacaaccactacacccagaagtctctgagcttaagccctggcggcggcggcggctccatgagcgggcggagcgccaacgcagggggaggaggctctggaggaggaggcagccaggtgcagctggtggagtctggaggaggagtggtgcagcccggcagaagcctgcggctgagctgcgcagcctctggcttcacctttagctcctacggcatgcactgggtgcggcaggcccctggcaagggactggagtgggtggccttcatcagatatgacggctccaataagtactatgccgattctgtgaagggcaggtttaccatcagccgcgacaactccaagaatacactgtacctgcagatgaactctctgagggccgaggacaccgccgtgtactattgcaagacacacggcagccacgataattggggccagggcaccatggtgacagtgtcttccggaggaggaggcagcatgagcgggcggagcgccaacgcagggggtggaggctccggaggaggaggctctcagagcgtgctgacccagccaccttccgtgtctggagcccccggacagagggtgacaatcagctgttccggctctcgcagcaacatcggcagcaataccgtgaagtggtatcagcagctgccaggcacagcccccaagctgctgatctactataatgaccagcggccttccggcgtgccagatagattctccggctctaagagcggcacctccgcctctctggccatcacaggcctgcaggcagaggacgaggcagattactattgtcagagctacgatagatatacccaccccgccctgctgtttggcaccggcacaaaggtgacagtgctg

SEQ ID NO: 327 - DNA, 2262 bp, Artificial Sequence
  CL_ 24831 full nt
gagccaaagagctccgacaagacccacacatgccccccttgtccggcgccagaggctgcaggaggaccaagcgtgttcctgtttccacccaagcctaaagacacactgatgatttcccgaacccccgaagtcacatgcgtggtcgtgtctgtgagtcacgaggaccctgaagtcaagttcaactggtacgtggatggcgtcgaggtgcataatgccaagactaaacctagggaggaacagtacaactcaacctatcgcgtcgtgagcgtcctgacagtgctgcaccaggattggctgaacggcaaagaatataagtgcaaagtgagcaataaggccctgcccgctcctatcgagaaaaccatttccaaggctaaagggcagcctcgcgaacctcaggtgtacgtgtatccaccctcccgcgatgagctgacaaagaaccaggtgtctctgacctgtctggtgaagggcttttaccctagcgacatcgccgtggagtgggagtccaatggccagccagagaacaattataagaccacacctccagtgctggactctgatggcagcttcgccctggtgtctaagctgacagtggacaagagcagatggcagcagggcaacgtgttttcttgtagcgtgatgcacgaggccctgcacaatcactacacccagaagtccctgagcttaagccctggaggcagcgccgatggaggaatctgggagctgaagaaggacgtgtacgtggtggagctggactggtatccagatgcaccaggagagatggtggtgctgacctgcgacacaccagaggaggatggcatcacctggacactggatcagagctccgaggtgctgggctccggcaagaccctgacaatccaggtgaaggagttcggcgacgccggacagtacacctgtcacaagggcggcgaggtgctgtcccactctctgctgctgctgcacaagaaggaggacggcatctggagcacagacatcctgaaggatcagaaggagcccaagaacaagaccttcctgaggtgcgaggccaagaattatagcggcagattcacctgttggtggctgaccacaatctccaccgatctgacattttctgtgaagtctagcaggggctcctctgaccctcagggagtgacatgcggagccgccaccctgagcgccgagcgggtgagaggcgataacaaggagtacgagtattccgtggagtgccaggaggacgtggcctgtcccaccgccgaggagaccctgcctatcgaagtgatggtggatgccgtgcacaagctgaagtacgagaattatacaagctccttctttatcagggacatcatcaagcccgatccccctaagaacctgcagctgaagcctctgaagaatagccgccaggtggaggtgtcctgggagtaccctgacacctggagcacaccacactcctatttctctctgaccttttgcgtgcaggtgcagggcaagtctaagagggagaagaaggaccgcgtgttcaccgataagacaagcgccaccgtgatctgtcggaagaacgccagcatctccgtgcgggcccaggatagatactataacagctcctggagcgagtgggcctccgtgccatgttctggaggaggaggcagcggcggaggaggctccggcggcggcggctctaatctgccagtggccacccctgacccaggcatgttcccctgcctgcaccactctcagaacctgctgcgggccgtgagcaatatgctgcagaaggccagacagacactggagttttacccatgtacctccgaggagatcgaccacgaggatatcacaaaggataagacctctacagtggaggcatgcctgccactggagctgaccaagaacgagagctgtctgaacagccgggagacatctttcatcaccaacggcagctgcctggcctccagaaagacatcttttatgatggccctgtgcctgtctagcatctacgaggacctgaagatgtatcaggtggagttcaagaccatgaacgccaagctgctgatggaccctaagaggcagatctttctggatcagaatatgctggccgtgatcgacgagctgatgcaggccctgaacttcaatagcgagacagtgccacagaagtcctctctggaggagcccgatttctacaagaccaagatcaagctgtgcatcctgctgcacgccttccggatcagagccgtgaccatcgaccgcgtgatgagctacctgaacgccagc

SEQ ID NO: 328 - DNA, 2262 bp, Artificial Sequence
  CL_ 24832 full nt
gagccaaagagctccgacaagacccacacatgccccccttgtccggcgccagaggctgcaggaggaccaagcgtgttcctgtttccacccaagcctaaagacacactgatgatttcccgaacccccgaagtcacatgcgtggtcgtgtctgtgagtcacgaggaccctgaagtcaagttcaactggtacgtggatggcgtcgaggtgcataatgccaagactaaacctagggaggaacagtacaactcaacctatcgcgtcgtgagcgtcctgacagtgctgcaccaggattggctgaacggcaaagaatataagtgcaaagtgagcaataaggccctgcccgctcctatcgagaaaaccatttccaaggctaaagggcagcctcgcgaacctcaggtgtacgtgtatccaccctcccgcgatgagctgacaaagaaccaggtgtctctgacctgtctggtgaagggcttttaccctagcgacatcgccgtggagtgggagtccaatggccagccagagaacaattataagaccacacctccagtgctggactctgatggcagcttcgccctggtgtctaagctgacagtggacaagagcagatggcagcagggcaacgtgttttcttgtagcgtgatgcacgaggccctgcacaatcactacacccagaagtccctgagcttaagccctggaggcagcgccgatggaggaatctgggagctgaagaaggacgtgtacgtggtggagctggactggtatccagatgcaccaggagagatggtggtgctgacctgcgacacaccagaggaggatggcatcacctggacactggatcagagctccgaggtgctgggctccggcaagaccctgacaatccaggtgaaggagttcggcgacgccggacagtacacctgtcacaagggcggcgaggtgctgtcccactctctgctgctgctgcacaagaaggaggacggcatctggagcacagacatcctgaaggatcagaaggagcccaagaacaagaccttcctgaggtgcgaggccaagaattatagcggcagattcacctgttggtggctgaccacaatctccaccgatctgacattttctgtgaagtctagcaggggctcctctgaccctcagggagtgacatgcggagccgccaccctgagcgccgagcgggtgagaggcgataacaaggagtacgagtattccgtggagtgccaggaggactctgcctgtcccgccgccgaggagtccctgcctatcgaagtgatggtggatgccgtgcacaagctgaagtacgagaattatacaagctccttctttatcagggacatcatcaagcccgatccccctaagaacctgcagctgaagcctctgaagaatagccgccaggtggaggtgtcctgggagtaccctgacacctggagcacaccacactcctatttctctctgaccttttgcgtgcaggtgcagggcaagtctaagagggagaagaaggaccgcgtgttcaccgataagacaagcgccaccgtgatctgtcggaagaacgccagcatctccgtgcgggcccaggatagatactattctagctcctggagcgagtgggcctccgtgccatgttctggaggaggaggcagcggcggaggaggctccggcggcggcggctctaatctgccagtggccacccctgacccaggcatgttcccctgcctgcaccactctcagaacctgctgcgggccgtgagcaatatgctgcagaaggccagacagacactggagttttacccatgtacctccgaggagatcgaccacgaggatatcacaaaggataagacctctacagtggaggcatgcctgccactggaggccaccaagaacgagagctgtctgaacagccgggagacatctttcatcaccaacggcagctgcctggcctccagaaagacatcttttatgatggccctgtgcctgtctagcatctacgaggacctgaagatgtatcaggtggagttcaagaccatgaacgccaagctgctgatggaccctaagaggcagatctttctggatcagaatatgctggccgtgatcgacgagctgatgcaggccctgaacttcaatagcgagacagtgccacagaagtcctctctggaggagcccgatttctacaagaccaagatcaagctgtgcatcctgctgcacgccttccggatcagagccgtgaccatcgaccgcgtgatgagctacctgaacgccagc

SEQ ID NO: 329 - DNA, 2262 bp, Artificial Sequence
  CL_ 24833 full nt
gagccaaagagctccgacaagacccacacatgccccccttgtccggcgccagaggctgcaggaggaccaagcgtgttcctgtttccacccaagcctaaagacacactgatgatttcccgaacccccgaagtcacatgcgtggtcgtgtctgtgagtcacgaggaccctgaagtcaagttcaactggtacgtggatggcgtcgaggtgcataatgccaagactaaacctagggaggaacagtacaactcaacctatcgcgtcgtgagcgtcctgacagtgctgcaccaggattggctgaacggcaaagaatataagtgcaaagtgagcaataaggccctgcccgctcctatcgagaaaaccatttccaaggctaaagggcagcctcgcgaacctcaggtgtacgtgtatccaccctcccgcgatgagctgacaaagaaccaggtgtctctgacctgtctggtgaagggcttttaccctagcgacatcgccgtggagtgggagtccaatggccagccagagaacaattataagaccacacctccagtgctggactctgatggcagcttcgccctggtgtctaagctgacagtggacaagagcagatggcagcagggcaacgtgttttcttgtagcgtgatgcacgaggccctgcacaatcactacacccagaagtccctgagcttaagccctggaggcagcgccgatggaggaatctgggagctgaagaaggacgtgtacgtggtggagctggactggtatccagatgcaccaggagagatggtggtgctgacctgcgacacaccagaggaggatggcatcacctggacactggatcagagctccgaggtgctgggctccggcaagaccctgacaatccaggtgaaggagttcggcgacgccggacagtacacctgtcacaagggcggcgaggtgctgtcccactctctgctgctgctgcacaagaaggaggacggcatctggagcacagacatcctgaaggatcagaaggagcccaagaacaagaccttcctgaggtgcgaggccaagaattatagcggcagattcacctgttggtggctgaccacaatctccaccgatctgacattttctgtgaagtctagcaggggctcctctgaccctcagggagtgacatgcggagccgccaccctgagcgccgagcgggtgagaggcgataacaaggagtacgagtattccgtggagtgccaggaggactctgcctgtcccgccgccgaggagtccctgcctatcgaagtgatggtggatgccgtgcacaagctgaagtacgagaattatacaagctccttctttatcagggacatcatcaagcccgatccccctaagaacctgcagctgaagcctctgaagaatagccgccaggtggaggtgtcctgggagtaccctgacacctggagcacaccacactcctatttctctctgaccttttgcgtgcaggtgcagggcaagtctaagagggagaagaaggaccgcgtgttcaccgataagacaagcgccaccgtgatctgtcggaagaacgccagcatctccgtgcgggcccaggatagatactattctagctcctggagcgagtgggcctccgtgccatgttctggaggaggaggcagcggcggaggaggctccggcggcggcggctctaatctgccagtggccacccctgacccaggcatgttcccctgcctgcaccactctcagaacctgctgcgggccgtgagcaatatgctgcagaaggccagacagacactggagttttacccatgtacctccgaggagatcgaccacgaggatatcacaaaggataagacctctacagtggaggcatgcctgccactggagctgaccaagaacgagagctgtctgaacagccgggagacatctttcatcaccaacggcagctgcctggcctccagaaagacatcttttatgatggccctgtgcctgtctagcatctacgaggacctgaagatgtatcaggtggagttcaagaccatgaacgccaagctgctgatggaccctaagaggcagatctttctggatcagaatatgctggccgtgatcgacgagctgatgcaggccctgaacttcaatagcgagacagtgccacagaagtcctctctggaggagcccgatttctacaagaccaagatcaagctgtgcatcctgctgcacgccttcgccatcagagccgtgaccatcgaccgcgtgatgagctacctgaacgccagc

SEQ ID NO: 330 - DNA, 2262 bp, Artificial Sequence
  CL_ 24834 full nt
gagccaaagagctccgacaagacccacacatgccccccttgtccggcgccagaggctgcaggaggaccaagcgtgttcctgtttccacccaagcctaaagacacactgatgatttcccgaacccccgaagtcacatgcgtggtcgtgtctgtgagtcacgaggaccctgaagtcaagttcaactggtacgtggatggcgtcgaggtgcataatgccaagactaaacctagggaggaacagtacaactcaacctatcgcgtcgtgagcgtcctgacagtgctgcaccaggattggctgaacggcaaagaatataagtgcaaagtgagcaataaggccctgcccgctcctatcgagaaaaccatttccaaggctaaagggcagcctcgcgaacctcaggtgtacgtgtatccaccctcccgcgatgagctgacaaagaaccaggtgtctctgacctgtctggtgaagggcttttaccctagcgacatcgccgtggagtgggagtccaatggccagccagagaacaattataagaccacacctccagtgctggactctgatggcagcttcgccctggtgtctaagctgacagtggacaagagcagatggcagcagggcaacgtgttttcttgtagcgtgatgcacgaggccctgcacaatcactacacccagaagtccctgagcttaagccctggaggcagcgccgatggaggaatctgggagctgaagaaggacgtgtacgtggtggagctggactggtatccagatgcaccaggagagatggtggtgctgacctgcgacacaccagaggaggatggcatcacctggacactggatcagagctccgaggtgctgggctccggcaagaccctgacaatccaggtgaaggagttcggcgacgccggacagtacacctgtcacaagggcggcgaggtgctgtcccactctctgctgctgctgcacaagaaggaggacggcatctggagcacagacatcctgaaggatcagaaggagcccaagaacaagaccttcctgaggtgcgaggccaagaattatagcggcagattcacctgttggtggctgaccacaatctccaccgatctgacattttctgtgaagtctagcaggggctcctctgaccctcagggagtgacatgcggagccgccaccctgagcgccgagcgggtgagaggcgataacaaggagtacgagtattccgtggagtgccaggaggactctgcctgtcccgccgccgaggagtccctgcctatcgaagtgatggtggatgccgtgcacaagctgaagtacgagaattatacaagctccttctttatcagggacatcatcaagcccgatccccctaagaacctgcagctgaagcctctgaagaatagccgccaggtggaggtgtcctgggagtaccctgacacctggagcacaccacactcctatttctctctgaccttttgcgtgcaggtgcagggcaagtctaagagggagaagaaggaccgcgtgttcaccgataagacaagcgccaccgtgatctgtcggaagaacgccagcatctccgtgcgggcccaggatagatactattctagctcctggagcgagtgggcctccgtgccatgttctggaggaggaggcagcggcggaggaggctccggcggcggcggctctaatctgccagtggccacccctgacccaggcatgttcccctgcctgcaccactctcagaacctgctgcgggccgtgagcaatatgctgcagaaggccagacagacactggagttttacccatgtacctccgaggagatcgaccacgaggatatcacaaaggataagacctctacagtggaggcatgcctgccactggagctgaccaagaacgagagctgtctgaacagccgggagacatctttcatcaccaacggcagctgcctggcctccagaaagacatcttttatgatggccctgtgcctgtctagcatctacgaggacctgaagatgtatcaggtggagttcaagaccatgaacgccaagctgctgatggaccctaagaggcagatctttctggatcagaatatgctggccgtgatcgacgagctgatgcaggccctgaacttcaatagcgagacagtgccacagaagtcctctctggaggagcccgatttctacaagaccaagatcaagctgtgcatcctgctgcacgccttccggatcagagccgccaccatcgaccgcgtgatgagctacctgaacgccagc

SEQ ID NO: 331 - DNA, 2262 bp, Artificial Sequence
  CL_ 24835 full nt
gagccaaagagctccgacaagacccacacatgccccccttgtccggcgccagaggctgcaggaggaccaagcgtgttcctgtttccacccaagcctaaagacacactgatgatttcccgaacccccgaagtcacatgcgtggtcgtgtctgtgagtcacgaggaccctgaagtcaagttcaactggtacgtggatggcgtcgaggtgcataatgccaagactaaacctagggaggaacagtacaactcaacctatcgcgtcgtgagcgtcctgacagtgctgcaccaggattggctgaacggcaaagaatataagtgcaaagtgagcaataaggccctgcccgctcctatcgagaaaaccatttccaaggctaaagggcagcctcgcgaaccacaggtgtacgtgtatcccccttcccgggacgagctgaccaagaaccaggtgtctctgacatgcctggtgaagggcttctaccccagcgatatcgccgtggagtgggagtccaatggccagcctgagaacaattataagaccacaccacccgtgctggacagcgatggctccttcgccctggtgtccaagctgaccgtggacaagtctaggtggcagcagggcaacgtgttttcttgcagcgtgatgcacgaggccctgcacaatcactacacccagaagtccctgagcttaagcccaggaggcagcgccgatggaggaatctgggagctgaagaaggacgtgtacgtggtggagctggactggtacccggatgccccaggcgagatggtggtgctgacctgcgacacacctgaggaggatggcatcacctggacactggatcagagctccgaggtgctgggctccggcaagaccctgacaatccaggtgaaggagttcggcgacgccggacagtacacatgtcacaagggaggagaggtgctgagccactccctgctgctgctgcacaagaaggaggacggcatctggagcacagacatcctgaaggatcagaaggagccaaagaacaagaccttcctgcggtgcgaggccaagaattatagcggcagattcacctgttggtggctgaccacaatcagcaccgatctgacattttccgtgaagtctagcaggggctcctctgacccccagggagtgacatgcggagccgccaccctgagcgccgagcgggtgagaggcgataacaaggagtacgagtattccgtggagtgccaggaggactctgcctgtccagccgccgaggagtccctgccaatcgaagtgatggtggatgccgtgcacaagctgaagtacgagaattatacaagctccttctttatcagggacatcatcaagcccgatccccctaagaacctgcagctgaagcccctgaagaacagcagacaggtggaggtgagctgggagtaccccgacacctggagcacacctcactcctatttctctctgaccttttgcgtgcaggtgcagggcaagtctaagagggagaagaaggaccgcgtgttcaccgataagacaagcgccaccgtgatctgtagaaagaacgcctctatcagcgtgcgggcacaggaccggtactacagctcctcttggtccgagtgggcctctgtgccatgcagcggaggaggaggctccggaggaggaggctctggcggcggcggcagcaacctgcctgtggccacccccgatcctggcatgttcccatgcctgcaccacagccagaacctgctgcgggccgtgtccaatatgctgcagaaggccaggcagaccctgcgcttttatccctgtacatctgaggagatcgaccacgaggatatcaccaaggacaagaccagcacagtggaggcctgcctgcctctggagctgacaaagaacgagtcctgtctgaacagccgggagaccagcttcatcacaaatggctcctgcctggcctctagaaagaccagctttatgatggccctgtgcctgagctccatctacgaggatctgaagatgtatcaggtggagttcaagacaatgaacgccaagctgctgatggaccccgagaggcagatctttctggatcagaatatgctggccgtgatcgacgagctgatgcaggccctgaacttcaattccgagaccgtgccacagaagtctagcctggaggagcccgatttctacgagacaaagatcaagctgtgcatcctgctgcacgcctttcggatcagagccgtgacaatcgaccgcgtgatgtcctatctgaacgcctct

SEQ ID NO: 332 - DNA, 2262 bp, Artificial Sequence
  CL_ 24836 full nt
gagccaaagagctccgacaagacccacacatgccccccttgtccggcgccagaggctgcaggaggaccaagcgtgttcctgtttccacccaagcctaaagacacactgatgatttcccgaacccccgaagtcacatgcgtggtcgtgtctgtgagtcacgaggaccctgaagtcaagttcaactggtacgtggatggcgtcgaggtgcataatgccaagactaaacctagggaggaacagtacaactcaacctatcgcgtcgtgagcgtcctgacagtgctgcaccaggattggctgaacggcaaagaatataagtgcaaagtgagcaataaggccctgcccgctcctatcgagaaaaccatttccaaggctaaagggcagcctcgcgaacctcaggtgtacgtgtatccaccctcccgcgatgagctgacaaagaaccaggtgtctctgacctgtctggtgaagggcttttaccctagcgacatcgccgtggagtgggagtccaatggccagccagagaacaattataagaccacacctccagtgctggactctgatggcagcttcgccctggtgtctaagctgacagtggacaagagcagatggcagcagggcaacgtgttttcttgtagcgtgatgcacgaggccctgcacaatcactacacccagaagtccctgagcttaagccctggaggcagcgccgatggaggaatctgggagctgaagaaggacgtgtacgtggtggagctggactggtatccagatgcaccaggagagatggtggtgctgacctgcgacacaccagaggaggatggcatcacctggacactggatcagagctccgaggtgctgggctccggcaagaccctgacaatccaggtgaaggagttcggcgacgccggacagtacacctgtcacaagggcggcgaggtgctgtcccactctctgctgctgctgcacaagaaggaggacggcatctggagcacagacatcctgaaggatcagaaggagcccaagaacaagaccttcctgaggtgcgaggccaagaattatagcggcagattcacctgttggtggctgaccacaatctccaccgatctgacattttctgtgaagtctagcaggggctcctctgaccctcagggagtgacatgcggagccgccaccctgagcgccgagcgggtgagaggcgataacaaggagtacgagtattccgtggagtgccaggaggactctgcctgtcccgccgccgaggagtccctgcctatcgaagtgatggtggatgccgtgcacaagctgaagtacgagaattatacaagctccttctttatcagggacatcatcaagcccgatccccctaagaacctgcagctgaagcctctgaagaatagccgccaggtggaggtgtcctgggagtaccctgacacctggagcacaccacactcctatttctctctgaccttttgcgtgcaggtgcagggcaagtctaagagggagaagaaggaccgcgtgttcaccgataagacaagcgccaccgtgatctgtcggaagaacgccagcatctccgtgcgggcccaggatagatactattctagctcctggagcgagtgggcctccgtgccatgttctggaggaggaggcagcggcggaggaggctccggcggcggcggctctaatctgccagtggccacccctgacccaggcatgttcccctgcctgcaccactctcagaacctgctgcgggccgtgagcaatatgctgcagaaggccagacagacactggagttttacagctgtacctccgaggagatcgaccacgaggatatcacaaaggataagacctctacagtggaggcatgcctgccactggagctgaccaagaacgagagctgtctgaacagccgggagacatctttcatcaccaacggcagctgcctggcctccagaaagacatcttttatgatggccctgtgcctgtctagcatctacgaggacctgaagatgtatcaggtggagttcaagaccatgaacgccaagctgctgatggaccctaagaggcagatctttctggatcagaatatgctggccgtgatcgacgagctgatgcaggccctgaacttcaatagcgagacagtgccacagaagtcctctctggaggagcccgatttctacaagaccaagcagaagctgtgcagcctgctgcacgccttccggatcagagccgtgaccatcgaccgcgtgatgagctacctgaacgccagc

SEQ ID NO: 333 - DNA, 2262 bp, Artificial Sequence
  CL_ 24837 full nt
gagccaaagagctccgacaagacccacacatgccccccttgtccggcgccagaggctgcaggaggaccaagcgtgttcctgtttccacccaagcctaaagacacactgatgatttcccgaacccccgaagtcacatgcgtggtcgtgtctgtgagtcacgaggaccctgaagtcaagttcaactggtacgtggatggcgtcgaggtgcataatgccaagactaaacctagggaggaacagtacaactcaacctatcgcgtcgtgagcgtcctgacagtgctgcaccaggattggctgaacggcaaagaatataagtgcaaagtgagcaataaggccctgcccgctcctatcgagaaaaccatttccaaggctaaagggcagcctcgcgaacctcaggtgtacgtgtatccaccctcccgcgatgagctgacaaagaaccaggtgtctctgacctgtctggtgaagggcttttaccctagcgacatcgccgtggagtgggagtccaatggccagccagagaacaattataagaccacacctccagtgctggactctgatggcagcttcgccctggtgtctaagctgacagtggacaagagcagatggcagcagggcaacgtgttttcttgtagcgtgatgcacgaggccctgcacaatcactacacccagaagtccctgagcttaagccctggaggcagcgccgatggaggaatctgggagctgaagaaggacgtgtacgtggtggagctggactggtatccagatgcaccaggagagatggtggtgctgacctgcgacacaccagaggaggatggcatcacctggacactggatcagagctccgaggtgctgggctccggcaagaccctgacaatccaggtgaaggagttcggcgacgccggacagtacacctgtcacaagggcggcgaggtgctgtcccactctctgctgctgctgcacaagaaggaggacggcatctggagcacagacatcctgaaggatcagaaggagcccaagaacaagaccttcctgaggtgcgaggccaagaattatagcggcagattcacctgttggtggctgaccacaatctccaccgatctgacattttctgtgaagtctagcaggggctcctctgaccctcagggagtgacatgcggagccgccaccctgagcgccgagcgggtgagaggcgataacaaggagtacgagtattccgtggagtgccaggaggactctgcctgtcccgccgccgaggagtccctgcctatcgaagtgatggtggatgccgtgcacaagctgaagtacgagaattatacaagctccttctttatcagggacatcatcaagcccgatccccctaagaacctgcagctgaagcctctgaagaatagccgccaggtggaggtgtcctgggagtaccctgacacctggagcacaccacactcctatttctctctgaccttttgcgtgcaggtgcagggcaagtctaagagggagaagaaggaccgcgtgttcaccgataagacaagcgccaccgtgatctgtcggaagaacgccagcatctccgtgcgggcccaggatagatactattctagctcctggagcgagtgggcctccgtgccatgttctggaggaggaggcagcggcggaggaggctccggcggcggcggctctaatctgccagtggccacccctgacccaggcatgttcccctgcctgcaccactctcagaacctgctgcgggccgtgagcaatatgctgcagaaggccagacagacactggagagcagcccatgtacctccgaggagatcgaccacgaggatatcacaaaggataagacctctacagtggaggcatgcctgccactggagctgaccaagaacgagagctgtctgaacagccgggagacatctttcatcaccaacggcagctgcctggcctccagaaagacatcttttatgatggccctgtgcctgtctagcatctacgaggacctgaagatgtatcaggtggagttcaagaccatgaacgccaagctgctgatggaccctaagaggcagatctttctggatcagaatatgctggccgtgatcgacgagctgatgcaggccctgaacttcaatagcgagacagtgccacagaagtcctctctggaggagcccgatttcagcaagaccaagatcaagctgtgcatcctgctgcacgccttccggatcagagccgtgaccatcgaccgcgtgatgagctacctgaacgccagc

SEQ ID NO: 334 - DNA, 2262 bp, Artificial Sequence
  CL_ 24838 full nt
gagccaaagagctccgacaagacccacacatgccccccttgtccggcgccagaggctgcaggaggaccaagcgtgttcctgtttccacccaagcctaaagacacactgatgatttcccgaacccccgaagtcacatgcgtggtcgtgtctgtgagtcacgaggaccctgaagtcaagttcaactggtacgtggatggcgtcgaggtgcataatgccaagactaaacctagggaggaacagtacaactcaacctatcgcgtcgtgagcgtcctgacagtgctgcaccaggattggctgaacggcaaagaatataagtgcaaagtgagcaataaggccctgcccgctcctatcgagaaaaccatttccaaggctaaagggcagcctcgcgaacctcaggtgtacgtgtatccaccctcccgcgatgagctgacaaagaaccaggtgtctctgacctgtctggtgaagggcttttaccctagcgacatcgccgtggagtgggagtccaatggccagccagagaacaattataagaccacacctccagtgctggactctgatggcagcttcgccctggtgtctaagctgacagtggacaagagcagatggcagcagggcaacgtgttttcttgtagcgtgatgcacgaggccctgcacaatcactacacccagaagtccctgagcttaagccctggaggcagcgccgatggaggaatctgggagctgaagaaggacgtgtacgtggtggagctggactggtatccagatgcaccaggagagatggtggtgctgacctgcgacacaccagaggaggatggcatcacctggacactggatcagagctccgaggtgctgggctccggcaagaccctgacaatccaggtgaaggagttcggcgacgccggacagtacacctgtcacaagggcggcgaggtgctgtcccactctctgctgctgctgcacaagaaggaggacggcatctggagcacagacatcctgaaggatcagaaggagcccaagaacaagaccttcctgaggtgcgaggccaagaattatagcggcagattcacctgttggtggctgaccacaatctccaccgatctgacattttctgtgaagtctagcaggggctcctctgaccctcagggagtgacatgcggagccgccaccctgagcgccgagcgggtgagaggcgataacaaggagtacgagtattccgtggagtgccaggaggactctgcctgtcccgccgccgaggagtccctgcctatcgaagtgatggtggatgccgtgcacaagctgaagtacgagaattatacaagctccttctttatcagggacatcatcaagcccgatccccctaagaacctgcagctgaagcctctgaagaatagccgccaggtggaggtgtcctgggagtaccctgacacctggagcacaccacactcctatttctctctgaccttttgcgtgcaggtgcagggcaagtctaagagggagaagaaggaccgcgtgttcaccgataagacaagcgccaccgtgatctgtcggaagaacgccagcatctccgtgcgggcccaggatagatactattctagctcctggagcgagtgggcctccgtgccatgttctggaggaggaggcagcggcggaggaggctccggcggcggcggctctaatctgccagtggccacccctgacccaggcatgttcccctgcctgcaccactctcagaacctgctgcgggccgtgagcaatatgctgcagaaggccagacagacactggagttttacccatgtgcctccagagagagcagacacgaggatatcacaaaggataagacctctacagtggaggcatgcctgccactggagctgaccaagaacgagagctgtctgaacagccgggagacatctttcatcaccaacggcagctgcctggcctccagaaagacatcttttatgatggccctgtgcctgtctagcatctacgaggacctgaagatgtatcaggtggagttcaagaccatgaacgccaagctgctgatggaccctaagaggcagatctttctggatcagaatatgctggccgtgatcgacgagctgatgcaggccctgaacttcaatagcgagacagtgccacagaagtcctctctggaggagcccgatttctacaagaccaagatcaagctgtgcatcctgctgcacgccttccggatcagagccgtgaccatcgaccgcgtgatgagctacctgaacgccagc

SEQ ID NO: 335 - DNA, 2262 bp, Artificial Sequence
  CL_ 24839 full nt
gagccaaagagctccgacaagacccacacatgccccccttgtccggcgccagaggctgcaggaggaccaagcgtgttcctgtttccacccaagcctaaagacacactgatgatttcccgaacccccgaagtcacatgcgtggtcgtgtctgtgagtcacgaggaccctgaagtcaagttcaactggtacgtggatggcgtcgaggtgcataatgccaagactaaacctagggaggaacagtacaactcaacctatcgcgtcgtgagcgtcctgacagtgctgcaccaggattggctgaacggcaaagaatataagtgcaaagtgagcaataaggccctgcccgctcctatcgagaaaaccatttccaaggctaaagggcagcctcgcgaacctcaggtgtacgtgtatccaccctcccgcgatgagctgacaaagaaccaggtgtctctgacctgtctggtgaagggcttttaccctagcgacatcgccgtggagtgggagtccaatggccagccagagaacaattataagaccacacctccagtgctggactctgatggcagcttcgccctggtgtctaagctgacagtggacaagagcagatggcagcagggcaacgtgttttcttgtagcgtgatgcacgaggccctgcacaatcactacacccagaagtccctgagcttaagccctggaggcagcgccgatggaggaatctgggagctgaagaaggacgtgtacgtggtggagctggactggtatccagatgcaccaggagagatggtggtgctgacctgcgacacaccagaggaggatggcatcacctggacactggatcagagctccgaggtgctgggctccggcaagaccctgacaatccaggtgaaggagttcggcgacgccggacagtacacctgtcacaagggcggcgaggtgctgtcccactctctgctgctgctgcacaagaaggaggacggcatctggagcacagacatcctgaaggatcagaaggagcccaagaacaagaccttcctgaggtgcgaggccaagaattatagcggcagattcacctgttggtggctgaccacaatctccaccgatctgacattttctgtgaagtctagcaggggctcctctgaccctcagggagtgacatgcggagccgccaccctgagcgccgagcgggtgagaggcgataacaaggagtacgagtattccgtggagtgccaggaggactctgcctgtcccgccgccgaggagtccctgcctatcgaagtgatggtggatgccgtgcacaagctgaagtacgagaattatacaagctccttctttatcagggacatcatcaagcccgatccccctaagaacctgcagctgaagcctctgaagaatagccgccaggtggaggtgtcctgggagtaccctgacacctggagcacaccacactcctatttctctctgaccttttgcgtgcaggtgcagggcaagtctaagagggagaagaaggaccgcgtgttcaccgataagacaagcgccaccgtgatctgtcggaagaacgccagcatctccgtgcgggcccaggatagatactattctagctcctggagcgagtgggcctccgtgccatgttctggaggaggaggcagcggcggaggaggctccggcggcggcggctctaatctgccagtggccacccctgacccaggcatgttcccctgcctgcaccactctcagaacctgctgcgggccgtgagcaatatgctgcagaaggccagacagacactggagttttacccatgtgcctccagaaagagcagacacaaggatatcacaaaggataagacctctacagtggaggcatgcctgccactggagctgaccaagaacgagagctgtctgaacagccgggagacatctttcatcaccaacggcagctgcctggcctccagaaagacatcttttatgatggccctgtgcctgtctagcatctacgaggacctgaagatgtatcaggtggagttcaagaccatgaacgccaagctgctgatggaccctaagaggcagatctttctggatcagaatatgctggccgtgatcgacgagctgatgcaggccctgaacttcaatagcgagacagtgccacagaagtcctctctggaggagcccgatttctacaagaccaagatcaagctgtgcatcctgctgcacgccttccggatcagagccgtgaccatcgaccgcgtgatgagctacctgaacgccagc

SEQ ID NO: 336 - DNA, 2262 bp, Artificial Sequence
  CL_ 24840 full nt
gagccaaagagctccgacaagacccacacatgccccccttgtccggcgccagaggctgcaggaggaccaagcgtgttcctgtttccacccaagcctaaagacacactgatgatttcccgaacccccgaagtcacatgcgtggtcgtgtctgtgagtcacgaggaccctgaagtcaagttcaactggtacgtggatggcgtcgaggtgcataatgccaagactaaacctagggaggaacagtacaactcaacctatcgcgtcgtgagcgtcctgacagtgctgcaccaggattggctgaacggcaaagaatataagtgcaaagtgagcaataaggccctgcccgctcctatcgagaaaaccatttccaaggctaaagggcagcctcgcgaacctcaggtgtacgtgtatccaccctcccgcgatgagctgacaaagaaccaggtgtctctgacctgtctggtgaagggcttttaccctagcgacatcgccgtggagtgggagtccaatggccagccagagaacaattataagaccacacctccagtgctggactctgatggcagcttcgccctggtgtctaagctgacagtggacaagagcagatggcagcagggcaacgtgttttcttgtagcgtgatgcacgaggccctgcacaatcactacacccagaagtccctgagcttaagccctggaggcagcgccgatggaggaatctgggagctgaagaaggacgtgtacgtggtggagctggactggtatccagatgcaccaggagagatggtggtgctgacctgcgacacaccagaggaggatggcatcacctggacactgagccagagctccagagtgctgggctccggcaagaccctgacaatccaggtgagcagcttcggcgacgccggacagtacacctgtcacaagggcggcgaggtgctgtcccactctctgctgctgctgcacaagaaggaggacggcatctggagcacagacatcctgaaggatcagaaggagcccaagaacaagaccttcctgaggtgcgaggccaagaattatagcggcagattcacctgttggtggctgaccacaatctccaccgatctgacattttctgtgaagtctagcaggggctcctctgaccctcagggagtgacatgcggagccgccaccctgagcgccgagcgggtgagaggcgataacaaggagtacgagtattccgtggagtgccaggaggactctgcctgtcccgccgccgaggagtccctgcctatcgaagtgatggtggatgccgtgcacgacctgaagtacgagaattatacaagctccttctttatcagggacatcatcaagcccgatccccctaagaacctgcagctgaagcctctgaagaatagccgccaggtggaggtgtcctgggagtaccctgacacctggagcacaccacactcctatttctctctgaccttttgcgtgcaggtgcagggcaagtctaagagggagaagaaggaccgcgtgttcaccgataagacaagcgccaccgtgatctgtcggaagaacgccagcatctccgtgcgggcccaggatagatactattctagctcctggagcgagtgggcctccgtgccatgttctggaggaggaggcagcggcggaggaggctccggcggcggcggctctaatctgccagtggccacccctgacccaggcatgttcccctgcctgcaccactctcagaacctgctgcgggccgtgagcaatatgctgcagaaggccagacagacactggagttttacccatgtacctccgaggagatcgaccacgaggatatcacaaaggataagacctctacagtggaggcatgcctgccactggagctgaccaagaacgagagctgtctgaacagccgggagacatctttcatcaccaacggcagctgcctggcctccagaaagacatcttttatgatggccctgtgcctgtctagcatctacgaggacctgaagatgtatcaggtggagttcaagaccatgaacgccaagctgctgatggaccctaagaggcagatctttctggatcagaatatgctggccgtgatcgacgagctgatgcaggccctgaacttcaatagcgagacagtgccacagaagtcctctctggaggagcccgatttctacaagaccaagatcaagctgtgcatcctgctgcacgccttccggatcagagccgtgaccatcgaccgcgtgatgagctacctgaacgccagc

SEQ ID NO: 337 - DNA, 2262 bp, Artificial Sequence
  CL_ 24841 full nt
gagccaaagagctccgacaagacccacacatgccccccttgtccggcgccagaggctgcaggaggaccaagcgtgttcctgtttccacccaagcctaaagacacactgatgatttcccgaacccccgaagtcacatgcgtggtcgtgtctgtgagtcacgaggaccctgaagtcaagttcaactggtacgtggatggcgtcgaggtgcataatgccaagactaaacctagggaggaacagtacaactcaacctatcgcgtcgtgagcgtcctgacagtgctgcaccaggattggctgaacggcaaagaatataagtgcaaagtgagcaataaggccctgcccgctcctatcgagaaaaccatttccaaggctaaagggcagcctcgcgaacctcaggtgtacgtgtatccaccctcccgcgatgagctgacaaagaaccaggtgtctctgacctgtctggtgaagggcttttaccctagcgacatcgccgtggagtgggagtccaatggccagccagagaacaattataagaccacacctccagtgctggactctgatggcagcttcgccctggtgtctaagctgacagtggacaagagcagatggcagcagggcaacgtgttttcttgtagcgtgatgcacgaggccctgcacaatcactacacccagaagtccctgagcttaagccctggaggcagcgccgatggaggaatctgggagctgaagaaggacgtgtacgtggtggagctggactggtatccagatgcaccaggagagatggtggtgctgacctgcgacacaccagaggaggatggcatcacctggacactggatcagagctccgaggtgctgggctccggcaagaccctgacaatccaggtgaaggagttcggcgacgccggacagtacacctgtcacaagggcggcgaggtgctgtcccactctctgctgctgctgcacaagaaggaggacggcatctggagcacagacatcctgaaggatcagagcagccccaagaacaagaccttcctgaggtgcgaggccaagaattatagcggcagattcacctgttggtggctgaccacaatctccaccgatctgacattttctgtgaagtctagcaggggctcctctgaccctcagggagtgacatgcggagccgccaccctgagcgccgagcgggtgagcggcgataacaaggagtacgagtattccgtggagtgccaggaggactctgcctgtcccgccgccgaggagtccctgcctatcgaagtgatggtggatgccgtgcacaagctgaagtacgagaattatacaagctccttctttatcagggacatcatcaagcccgatccccctaagaacctgcagctgaagcctctgaagaatagccgccaggtggaggtgtcctgggagtaccctgacacctggagcacaccacactcctatttctctctgaccttttgcgtgcaggtgcagggcaagtctaagagggagaagaaggaccgcgtgttcaccgataagacaagcgccaccgtgatctgtcggaagaacgccagcatctccgtgcgggcccaggatagatactattctagctcctggagcgagtgggcctccgtgccatgttctggaggaggaggcagcggcggaggaggctccggcggcggcggctctaatctgccagtggccacccctgacccaggcatgttcccctgcctgcaccactctcagaacctgctgcgggccgtgagcaatatgctgcagaaggccagacagacactggagttttacccatgtacctccgaggagatcgaccacgaggatatcacaaaggataagacctctacagtggaggcatgcctgccactggagctgaccaagaacgagagctgtctgaacagccgggagacatctttcatcaccaacggcagctgcctggcctccagaaagacatcttttatgatggccctgtgcctgtctagcatctacgaggacctgaagatgtatcaggtggagttcaagaccatgaacgccaagctgctgatggaccctaagaggcagatctttctggatcagaatatgctggccgtgatcgacgagctgatgcaggccctgaacttcaatagcgagacagtgccacagaagtcctctctggaggagcccgatttctacaagaccaagatcaagctgtgcatcctgctgcacgccttccggatcagagccgtgaccatcgaccgcgtgatgagctacctgaacgccagc

SEQ ID NO: 338 - DNA, 2262 bp, Artificial Sequence
  CL_ 24842 full nt
gagccaaagagctccgacaagacccacacatgccccccttgtccggcgccagaggctgcaggaggaccaagcgtgttcctgtttccacccaagcctaaagacacactgatgatttcccgaacccccgaagtcacatgcgtggtcgtgtctgtgagtcacgaggaccctgaagtcaagttcaactggtacgtggatggcgtcgaggtgcataatgccaagactaaacctagggaggaacagtacaactcaacctatcgcgtcgtgagcgtcctgacagtgctgcaccaggattggctgaacggcaaagaatataagtgcaaagtgagcaataaggccctgcccgctcctatcgagaaaaccatttccaaggctaaagggcagcctcgcgaacctcaggtgtacgtgtatccaccctcccgcgatgagctgacaaagaaccaggtgtctctgacctgtctggtgaagggcttttaccctagcgacatcgccgtggagtgggagtccaatggccagccagagaacaattataagaccacacctccagtgctggactctgatggcagcttcgccctggtgtctaagctgacagtggacaagagcagatggcagcagggcaacgtgttttcttgtagcgtgatgcacgaggccctgcacaatcactacacccagaagtccctgagcttaagccctggaggcagcgccgatggaggaatctgggagctgaagaaggacgtgtacgtggtggagctggactggtatccagatgcaccaggagagatggtggtgctgacctgcgacacaccagaggaggatggcatcacctggacactggatcagagctccgaggtgctgggctccggcaagaccctgacaatccaggtgaaggagttcggcgacgccggacagtacacctgtcacaagggcggcgaggtgctgtcccactctctgctgctgctgcacaagaaggaggacggcatctggagcacagacatcctgaaggatcagaaggagcccaagaacaagaccttcctgaggtgcgaggccaagaattatagcggcagattcacctgttggtggctgaccacaatctccaccgatctgacattttctgtgaagtctagcaggggctcctctgaccctcagggagtgacatgcggagccgccaccctgagcgccgagcgggtgagaggcgataacaaggagtacgagtattccgtggagtgccaggaggactctgcctgtcccgccgccgaggagtccctgcctatcagcgtgatggtggatgccgtgcacaagctgaagtacgagaattatagcagcagattctttatcagggacatcatcaagcccgatccccctaagaacctgcagctgaagcctctgaagaatagccgccaggtggaggtgtcctgggagtaccctgacacctggagcacaccacactcctatttctctctgaccttttgcgtgcaggtgcagggcaagtctaagagggagaagaaggaccgcgtgttcaccgataagacaagcgccaccgtgatctgtcggaagaacgccagcatctccgtgcgggcccaggatagatactattctagctcctggagcgagtgggcctccgtgccatgttctggaggaggaggcagcggcggaggaggctccggcggcggcggctctaatctgccagtggccacccctgacccaggcatgttcccctgcctgcaccactctcagaacctgctgcgggccgtgagcaatatgctgcagaaggccagacagacactggagttttacccatgtacctccgaggagatcgaccacgaggatatcacaaaggataagacctctacagtggaggcatgcctgccactggagctgaccaagaacgagagctgtctgaacagccgggagacatctttcatcaccaacggcagctgcctggcctccagaaagacatcttttatgatggccctgtgcctgtctagcatctacgaggacctgaagatgtatcaggtggagttcaagaccatgaacgccaagctgctgatggaccctaagaggcagatctttctggatcagaatatgctggccgtgatcgacgagctgatgcaggccctgaacttcaatagcgagacagtgccacagaagtcctctctggaggagcccgatttctacaagaccaagatcaagctgtgcatcctgctgcacgccttccggatcagagccgtgaccatcgaccgcgtgatgagctacctgaacgccagc

SEQ ID NO: 339 - DNA, 1515 bp, Artificial Sequence
  CL_ 26498 full nt
gagccaaagagctccgacaagacccacacatgccccccttgtccggcgccagaggcagcaggaggaccaagcgtgttcctgtttccacccaagcccaaagacaccctgatgattagccgaacccctgaagtcacatgcgtggtcgtgtccgtgtctcacgaggacccagaagtcaagttcaactggtacgtggatggcgtcgaggtgcataatgccaagacaaaaccccgggaggaacagtacaacagcacctatagagtcgtgtccgtcctgacagtgctgcaccaggattggctgaacggcaaggaatataagtgcaaagtgtccaataaggccctgcccgctcctatcgagaaaaccatttctaaggcaaaaggccagcctcgcgagcctcaggtgtacgtgctgccaccttcccgcgacgagctgaccaagaatcaggtgtctctgctgtgcctggtgaagggcttctatccaagcgatatcgcagtggagtgggagtccaacggacagcccgagaacaattacctgacctggccacccgtgctggacagcgatggctccttctttctgtattccaagctgacagtggacaagtctagatggcagcagggcaacgtgttcagctgttccgtgatgcacgaggccctgcacaaccactacacccagaagtctctgagcttaagccctggaggaggaggaggctccggcggaggaggctccatgagcgggcggagcgccaacgcagggggcggcggctccggcggcggcggctctcaggtgcagctggtggagagcggaggaggagtggtgcagcccggcagaagcctgcggctgagctgcgcagcctctggcgtgacctttagctcctacggcatgcactgggtgcggcaggcccctggcaagggactggagtgggtggccttcatcagatatgacggcagcaataagtactatgccgattccgtgaagggcaggtttaccatcagccgcgacaactccaagaatacactgtacctgcagatgaacagcctgagggccgaggacaccgccgtgtactattgtaagacacacggctcccacgataattggggccagggcaccatggtgacagtgtctagcggcggctctggcggcggcagcgggggtggctctggaggaggcagcggaggaggctccggccagtctgtgctgacccagccaccttctgtgagcggagcccccggacagagggtgacaatctcctgctctggcagccgctccaacatcggcagcaataccgtgaagtggtatcagcagctgccaggcacagcccccaagctgctgatctactataatgaccagcggccttccggcgtgccagatagattctctggcagcaagtccggcacctctgccagcctggccatcacaggcctgcaggcagaggacgaggcagattactattgtcagtcctacgatagatatacccaccccgccctgctgtttggcaccggcacaaaggtgacagtgctg

SEQ ID NO: 340 - protein, 1032 aa, Artificial Sequence
  CL_ 26320 full AA
EPKSSDKTHTCPPCPAPEAAGGPSVFLFPPKPKDTLMISRTPEVTCVVVSVSHEDPEVKFNWYVDGVEVHNAKTKPREEQYNSTYRVVSVLTVLHQDWLNGKEYKCKVSNKALPAPIEKTISKAKGQPREPQVYVYPPSRDELTKNQVSLTCLVKGFYPSDIAVEWESNGQPENNYKTTPPVLDSDGSFALVSKLTVDKSRWQQGNVFSCSVMHEALHNHYTQKSLSLSPGGSADGGIWELKKDVYVVELDWYPDAPGEMVVLTCDTPEEDGITWTLDQSSEVLGSGKTLTIQVKEFGDAGQYTCHKGGEVLSHSLLLLHKKEDGIWSTDILKDQKEPKNKTFLRCEAKNYSGRFTCWWLTTISTDLTFSVKSSRGSSDPQGVTCGAATLSAERVRGDNKEYEYSVECQEDSACPAAEESLPIEVMVDAVHKLKYENYTSSFFIRDIIKPDPPKNLQLKPLKNSRQVEVSWEYPDTWSTPHSYFSLTFCVQVQGKSKREKKDRVFTDKTSATVICRKNASISVRAQDRYYSSSWSEWASVPCSGGGGSGGGGSGGGGSNLPVATPDPGMFPCLHHSQNLLRAVSNMLQKARQTLEFYPCTSEEIDHEDITKDKTSTVEACLPLELTKNESCLNSRETSFITNGSCLASRKTSFMMALCLSSIYEDLKMYQVEFKTMNAKLLMDPKRQIFLDQNMLAVIDELMQALNFNSETVPQKSSLEEPDFYKTKIKLCILLHAFRIRAVTIDRVMSYLNASGGGGSGGGSGGGSGGGGSGGGGSGGGGSGGGGSEIVMTQSPATLSVSPGERATLSCRASQSISINLHWYQQKPGQAPRLLIYFASQSISGIPARFSGSGSGTEFTLTISSLQSEDFAVYYCQQSNSFPLTFGGGTKVEIKGGSGGGSGGGSGGGSGGGSGQVQLVQSGAEVKKPGASVKVSCKASGYTFTDYYLHWVRQAPGQGLEWMGWIDPENGDTEYAPKFQGRVTMTTDTSTSTAYMELRSLRSDDTAVYYCNANKELRYFDVWGQGTMVTVSS

SEQ ID NO: 341 - protein, 505 aa, Artificial Sequence
  CL_ 26503 full AA
EPKSSDKTHTCPPCPAPEAAGGPSVFLFPPKPKDTLMISRTPEVTCVVVSVSHEDPEVKFNWYVDGVEVHNAKTKPREEQYNSTYRVVSVLTVLHQDWLNGKEYKCKVSNKALPAPIEKTISKAKGQPREPQVYVLPPSRDELTKNQVSLLCLVKGFYPSDIAVEWESNGQPENNYLTWPPVLDSDGSFFLYSKLTVDKSRWQQGNVFSCSVMHEALHNHYTQKSLSLSPGGGGGSGGGGSGGGSGGGSGGGGSGGGGSQVQLVESGGGVVQPGRSLRLSCAASGFTFSSYGMHWVRQAPGKGLEWVAFIRYDGSNKYYADSVKGRFTISRDNSKNTLYLQMNSLRAEDTAVYYCKTHGSHDNWGQGTMVTVSSGGSGGGSGGGSGGGSGGGSGQSVLTQPPSVSGAPGQRVTISCSGSRSNIGSNTVKWYQQLPGTAPKLLIYYNDQRPSGVPDRFSGSKSGTSASLAITGLQAEDEADYYCQSYDRYTHPALLFGTGTKVTVL

SEQ ID NO: 342 - DNA, 3096 bp, Artificial Sequence
  CL_ 26320 full nt
gagccaaagagctccgacaagacccacacatgccccccttgtccggcgccagaggctgcaggaggaccaagcgtgttcctgtttccacccaagcctaaagacacactgatgatttcccgaacccccgaagtcacatgcgtggtcgtgtctgtgagtcacgaggaccctgaagtcaagttcaactggtacgtggatggcgtcgaggtgcataatgccaagactaaacctagggaggaacagtacaactcaacctatcgcgtcgtgagcgtcctgacagtgctgcaccaggattggctgaacggcaaagaatataagtgcaaagtgagcaataaggccctgcccgctcctatcgagaaaaccatttccaaggctaaagggcagcctcgcgaaccacaggtgtacgtgtatcccccttcccgggacgagctgaccaagaaccaggtgtctctgacatgcctggtgaagggcttctaccccagcgatatcgccgtggagtgggagtccaatggccagcctgagaacaattataagaccacaccacccgtgctggacagcgatggctccttcgccctggtgtccaagctgaccgtggacaagtctaggtggcagcagggcaacgtgttttcttgcagcgtgatgcacgaggccctgcacaatcactacacccagaagtccctgagcttaagcccaggaggcagcgccgatggaggaatctgggagctgaagaaggacgtgtacgtggtggagctggactggtacccggatgccccaggcgagatggtggtgctgacctgcgacacacctgaggaggatggcatcacctggacactggatcagagctccgaggtgctgggctccggcaagaccctgacaatccaggtgaaggagttcggcgacgccggacagtacacatgtcacaagggaggagaggtgctgagccactccctgctgctgctgcacaagaaggaggacggcatctggagcacagacatcctgaaggatcagaaggagccaaagaacaagaccttcctgcggtgcgaggccaagaattatagcggcagattcacctgttggtggctgaccacaatcagcaccgatctgacattttccgtgaagtctagcaggggctcctctgacccccagggagtgacatgcggagccgccaccctgagcgccgagcgggtgagaggcgataacaaggagtacgagtattccgtggagtgccaggaggactctgcctgtccagccgccgaggagtccctgccaatcgaagtgatggtggatgccgtgcacaagctgaagtacgagaattatacaagctccttctttatcagggacatcatcaagcccgatccccctaagaacctgcagctgaagcccctgaagaacagcagacaggtggaggtgagctgggagtaccccgacacctggagcacacctcactcctatttctctctgaccttttgcgtgcaggtgcagggcaagtctaagagggagaagaaggaccgcgtgttcaccgataagacaagcgccaccgtgatctgtagaaagaacgcctctatcagcgtgcgggcacaggaccggtactacagctcctcttggagcgagtgggcctccgtgccctgctctggcggcggcggctctggaggaggaggcagcggcggaggaggctccaacctgcctgtggccacccccgatcctggcatgttcccatgcctgcaccactcccagaacctgctgagggccgtgtctaatatgctgcagaaggcccgccagacactggagttttatccctgtacctccgaggagatcgaccacgaggatatcacaaaggacaagaccagcacagtggaggcctgcctgcctctggagctgaccaagaacgagagctgtctgaacagccgggagaccagcttcatcaccaatggcagctgcctggcctccagaaagacatcttttatgatggccctgtgcctgagctccatctacgaggatctgaagatgtatcaggtggagttcaagaccatgaacgccaagctgctgatggaccctaagcggcagatctttctggatcagaatatgctggccgtgatcgacgagctgatgcaggccctgaacttcaattccgagacagtgccccagaagtctagcctggaggagcctgatttctacaagaccaagatcaagctgtgcatcctgctgcacgcctttcggatcagagccgtgaccatcgacagagtgatgtcttatctgaacgccagcggcggcggaggctctggcggcgggagcggcggcggcagcgggggaggaggctccggaggaggaggctctggcggcggcggcagcggcggcggcggcagcgagatcgtgatgacacagtcccctgccaccctgtccgtgtctccaggagagagggccacactgagctgtagagccagccagtccatctctatcaacctgcactggtatcagcagaagccaggacaggcccccaggctgctgatctatttcgccagccagagcatttctggcatccctgcacgcttcagcggctccggctctggcaccgagtttaccctgacaatctcctctctgcagtccgaggattttgccgtgtactattgccagcagagcaattccttcccactgacatttggcggcggcaccaaggtggagatcaagggaggcagcggcggcggctccggcggcggctctggcggcggcagcggaggaggctccggacaggtgcagctggtgcagagcggagccgaggtgaagaagccaggggccagcgtgaaggtgagctgtaaggcctccggctacaccttcacagactactatctgcactgggtgaggcaggcccccggccagggactggagtggatgggctggatcgacccagagaacggcgatacagagtacgcccccaagtttcagggccgcgtgaccatgaccacagatacctctacaagcaccgcctatatggagctgaggtccctgcgctctgacgataccgccgtgtactattgtaacgccaataaggagctgaggtactttgacgtgtggggccagggcacaatggtgaccgtgagctcc

SEQ ID NO: 343 - DNA, 1515 bp, Artificial Sequence
  CL_ 26503 full nt
gagccaaagagctccgacaagacccacacatgccccccttgtccggcgccagaggcagcaggaggaccaagcgtgttcctgtttccacccaagcccaaagacaccctgatgattagccgaacccctgaagtcacatgcgtggtcgtgtccgtgtctcacgaggacccagaagtcaagttcaactggtacgtggatggcgtcgaggtgcataatgccaagacaaaaccccgggaggaacagtacaacagcacctatagagtcgtgtccgtcctgacagtgctgcaccaggattggctgaacggcaaggaatataagtgcaaagtgtccaataaggccctgcccgctcctatcgagaaaaccatttctaaggcaaaaggccagcctcgcgagcctcaggtgtacgtgctgccaccttcccgcgacgagctgaccaagaatcaggtgtctctgctgtgcctggtgaagggcttctatccaagcgatatcgcagtggagtgggagtccaacggacagcccgagaacaattacctgacctggccacccgtgctggacagcgatggctccttctttctgtattccaagctgacagtggacaagtctagatggcagcagggcaacgtgttcagctgttccgtgatgcacgaggccctgcacaaccactacacccagaagtctctgagcttaagccctggaggaggaggaggctccggcggaggaggctccggcggcgggagcggcggcggcagcgggggcggcggctccggcggcggcggctctcaggtgcagctggtggagagcggaggaggagtggtgcagcccggcagaagcctgcggctgagctgcgcagcctctggcttcacctttagctcctacggcatgcactgggtgcggcaggcccctggcaagggactggagtgggtggccttcatcagatatgacggcagcaataagtactatgccgattccgtgaagggcaggtttaccatcagccgcgacaactccaagaatacactgtacctgcagatgaacagcctgagggccgaggacaccgccgtgtactattgtaagacacacggctcccacgataattggggccagggcaccatggtgacagtgtctagcggcggctctggcggcggcagcgggggtggctctggaggaggcagcggaggaggctccggccagtctgtgctgacccagccaccttctgtgagcggagcccccggacagagggtgacaatctcctgctctggcagccgctccaacatcggcagcaataccgtgaagtggtatcagcagctgccaggcacagcccccaagctgctgatctactataatgaccagcggccttccggcgtgccagatagattctctggcagcaagtccggcacctctgccagcctggccatcacaggcctgcaggcagaggacgaggcagattactattgtcagtcctacgatagatatacccaccccgccctgctgtttggcaccggcacaaaggtgacagtgctg

SEQ ID NO: 344 - protein, 115 aa, Artificial Sequence
  Human PD-1 variant
AFTVTVPKDLYVVEYGSNMTIECKFPVEKQLDLAALQVFWMMEDKNIIQFVHGEEDLKVQHSSYRQRARLLKDQLSLGNAALQITDVKLQDAGVYTCLIAYKGADYKRITVKVNA

SEQ ID NO: 345 - protein, 114 aa, Artificial Sequence
  Human PD-1 variant
NPPTFSPALLVVTEGDNATFTCSFSNTSESFVLNWYRMSPSNQTDKLAAFPEDRSQPGQDSRFRVTQLPNGRDFHMSVVRARRNDSGTYLCGAISLAPKAQIKESLRAELRVTE

SEQ ID NO: 346 - protein, 8 aa, Artificial Sequence
  Protease cleavage sequence
GTGRSANA

SEQ ID NO: 347 - protein, 8 aa, Artificial Sequence
  Protease cleavage sequence
ASGRSANA

SEQ ID NO: 348 - protein, 8 aa, Artificial Sequence
  Protease cleavage sequence
GSGKSANA

SEQ ID NO: 349 - protein, 8 aa, Artificial Sequence
  Protease cleavage sequence
GSGRNAQV

SEQ ID NO: 350 - protein, 8 aa, Artificial Sequence
  Protease cleavage sequence
GSGKNAQV

SEQ ID NO: 351 - protein, 8 aa, Artificial Sequence
  Protease cleavage sequence
GTARLRGV

SEQ ID NO: 352 - protein, 8 aa, Artificial Sequence
  Protease cleavage sequence
GTSRMGTV

SEQ ID NO: 353 - protein, 8 aa, Artificial Sequence
  Protease cleavage sequence
GTSRQAQV

SEQ ID NO: 354 - protein, 8 aa, Artificial Sequence
  Protease cleavage sequence
AIKRSAQV

SEQ ID NO: 355 - protein, 8 aa, Artificial Sequence
  Protease cleavage sequence
STARMLQV

SEQ ID NO: 356 - protein, 8 aa, Artificial Sequence
  Protease cleavage sequence
GTQRSTGV

SEQ ID NO: 357 - protein, 8 aa, Artificial Sequence
  Protease cleavage sequence
GTRRDRIV

SEQ ID NO: 358 - protein, 8 aa, Artificial Sequence
  Protease cleavage sequence
GVARNYKV

SEQ ID NO: 359 - protein, 8 aa, Artificial Sequence
  Protease cleavage sequence
GGGRSANA

SEQ ID NO: 360 - protein, 8 aa, Artificial Sequence
  Protease cleavage sequence
GVGRSANA

SEQ ID NO: 361 - protein, 8 aa, Artificial Sequence
  Protease cleavage sequence
GIGRSANA

SEQ ID NO: 362 - protein, 8 aa, Artificial Sequence
  Protease cleavage sequence
GHGRSANA

SEQ ID NO: 363 - protein, 8 aa, Artificial Sequence
  Protease cleavage sequence
KSGRSANA

SEQ ID NO: 364 - protein, 8 aa, Artificial Sequence
  Protease cleavage sequence
TSGRSANA

SEQ ID NO: 365 - protein, 8 aa, Artificial Sequence
  Protease cleavage sequence
SSGRSANA

SEQ ID NO: 366 - protein, 8 aa, Artificial Sequence
  Protease cleavage sequence
RSGRSANA

What is claimed is:

1. A masked interleukin 12 (IL12) fusion protein, comprising:
a. an Fc domain comprising a first Fc polypeptide and a second Fc polypeptide;
b. a masking moiety (MM); and
c. an IL12 polypeptide;
wherein the masking moiety is fused to the first Fc polypeptide by a first linker; and
optionally, wherein the masking moiety further comprises a second linker;
wherein the IL12 polypeptide is fused to the second Fc polypeptide by a third linker;
wherein at least one of the first, second or third linkers is protease cleavable; and
wherein the IL12 activity of the masked IL12 fusion protein is attenuated as compared to the IL12 activity of the IL12 containing polypeptide released after cleavage of the at least one protease cleavable linker.

2. The masked IL12 fusion protein of claim 1, wherein the first linker is protease cleavable and optionally, the second linker is protease cleavable.

3. The masked IL12 fusion protein of claim 1, wherein the third linker is protease cleavable and optionally, the first or second linker is protease cleavable, or both.

4. The masked IL12 fusion protein of claim 1, wherein the first linker comprises a cleavage sequence selected from the group consisting of the cleavage sites listed in Table 3 and Table 24.

5. The masked IL12 fusion protein of claim 1, wherein the first linker comprises a cleavage sequence having the amino acid sequence MSGRSANA (SEQ ID NO:10).

6. The masked IL12 fusion protein of claim 1, wherein the protease cleavable linker is cleaved by a protease selected from the group consisting of a matrix metalloproteinase (MMP), a matriptase, a cathepsin, a kallikrein, a caspase, a serine protease, and an elastase.

7. The masked IL12 fusion protein of claim 1, wherein the first, second and third linkers are cleaved by the same protease.

8. The masked IL12 fusion protein of claim 1, wherein the masking moiety is a single-chain Fv (scFv) antibody fragment, an IL12 receptor β2 subunit (IL12Rβ2) or an IL12-binding fragment thereof, or an IL12 receptor β1 subunit (IL12Rβ1) or an IL12-binding fragment thereof.

9. The masked IL12 fusion protein of claim 8, wherein the scFv comprises the VHCDR1-3 having the amino acid sequences set forth in SEQ ID NOs:β-15, respectively and the VLCDR1-3 having the amino acid sequence set forth in SEQ ID NOs:16-18, respectively.

10. The masked IL12 fusion protein of claim 8, wherein the scFv comprises a VH and VL comprising the amino acid sequence set forth in SEQ ID NOs:11 and 12, respectively; or a VH and VL comprising the amino acid sequence set forth in SEQ ID NOs:255 and 256, respectively.

11. The masked IL12 fusion protein of claim 8, wherein the scFv comprises a variant of the VH having the amino acid sequence set forth in SEQ ID NO:11 wherein the variant is selected from the group consisting of H_Y32A; H_F27V; H_Y52AV; H_R52E; H_R52E_Y52AV; H_H95D; H_G96T; and H_H98A, according to Kabat numbering; and the VL having the amino acid sequence set forth in SEQ ID NO: 12.

12. The masked IL12 fusion protein of claim 8, wherein the masking moiety is selected from an ECD of human IL12Rβ2, amino acids 24-321 of human IL12Rβ2 (IL12Rβ224-321), amino acids 24-124 of human IL12Rβ2 (IL12Rβ24-124), amino acids 24-240 of human IL12Rβ1 (IL12Rβ124-240) and an IL23R ECD.

13. The masked IL12 fusion protein of claim 1, wherein the IL12 polypeptide comprises the amino acid sequence set forth in SEQ ID NO:22 or 23.

14. The masked IL12 fusion protein of claim 13, wherein the IL12 polypeptide comprises the p40 polypeptide amino acid sequence set forth in SEQ ID NO:22 and the p35 IL12 polypeptide is non-covalently bound to the p40 polypeptide.

15. The masked IL12 fusion protein of claim 13, wherein the IL12 polypeptide comprises the p35 polypeptide amino acid sequence set forth in SEQ ID NO:23 and the p40 IL12 polypeptide is non-covalently bound to the p40 polypeptide.

16. The masked IL12 fusion protein of claim 1, wherein the IL12 polypeptide is a single chain IL12 polypeptide selected from a single chain IL12 polypeptide having the orientation p35-linker-p40 or p40-linker-p35.

17. The masked IL12 fusion protein of claim 16, wherein the fusion protein is selected from variants 29243, 29244, 31277, 32039, 32042, 32045, and 32454.

18. The masked IL12 fusion protein of claim 16, wherein the single chain IL12 polypeptide is a p40-linker-p35 polypeptide that is fused to the second Fc polypeptide at the p40 polypeptide.

19. The masked IL12 fusion protein of claim 16, wherein the single chain IL12 polypeptide is a p35-linker-p40 polypeptide that is fused to the second Fc polypeptide at the p35 polypeptide.

20. The masked IL12 fusion protein of claim 18 or claim 19, wherein the single chain IL12 polypeptide is fused to the c-terminal end of the second Fc polypeptide.

21. The masked IL12 fusion protein of claim 18 or claim 19, wherein the single chain IL12 polypeptide is fused to the c-terminal end of the second Fc polypeptide and the masking moiety is fused to the c-terminal end of the first Fc polypeptide.

22. The masked IL12 fusion protein of claim 18 or claim 19, wherein the single chain IL12 polypeptide is fused to the second Fc polypeptide and wherein the third linker is protease cleavable.

23. The masked IL12 fusion protein of claim 18 or claim 19, wherein the P40 domain of the IL12 polypeptide has been modified to be more resistant to proteolytic cleavage as compared to an unmodified P40 domain.

24. The masked IL12 fusion protein of claim 20, wherein the masking moiety is a single-chain Fv (scFv) antibody fragment; and wherein the IL12 fusion protein further comprises a second masking moiety comprising an additional scFv fused by a fourth linker to the p35 domain of the IL12 polypeptide.

25. The masked IL12 fusion protein of claim 24, wherein the first and fourth linkers are protease cleavable.

26. The masked IL12 fusion protein of claim 20, wherein the masking moiety comprises a first scFv fused to a second scFv by a fourth linker.

27. The masked IL12 fusion protein of claim 26, wherein the first and fourth linkers are protease cleavable.

28. The masked IL12 fusion protein of claim 27, wherein the masking moiety is in the following orientation: first Fc polypeptide-L1-VH-VL-L4-VH-VL; or first Fc polypeptide-L1-VH-VL-L4-VL-VH.

29. The masked IL12 fusion protein of claim 28, wherein the first and fourth linkers are protease cleavable.

30. The masked IL12 fusion protein of claim 1, wherein the masking moiety comprises an IL12 receptor β2 subunit (IL12Rβ2) or an IL12-binding fragment thereof, and an IL12 receptor β1 subunit (IL12Rβ1) or an IL12-binding fragment thereof, fused by the second linker.

31. The masked IL12 fusion protein of claim 30, wherein the masking moiety comprises an IL12Rβ2-Ig domain fused to the c-terminal end of the first Fc polypeptide and the IL12Rβ1 fused by the second linker to the c-terminal end of the IL12Rβ2-Ig domain.

32. The masked IL12 fusion protein of claim 31, wherein the first and the second linker are protease cleavable.

33. The masked IL12 fusion protein of claim 20, wherein the masking moiety is an IL12Rβ1 or an IL12-binding fragment thereof; and wherein the IL12 fusion protein further comprises a second masking moiety comprising an IL12Rβ2 or an IL12-binding fragment thereof fused by a fourth linker to the p35 domain of the IL12 polypeptide.

34. The masked IL12 fusion protein of claim 33, wherein the first and the fourth linker are protease cleavable.

35. The masked IL12 fusion protein of claim 1 further comprising a targeting domain.

36. The masked IL12 fusion protein of claim 35 wherein the targeting domain specifically binds a tumor-associated antigen.

37. The masked IL12 fusion protein of claim 1, wherein the first Fc polypeptide comprises a first CH3 domain and the second Fc polypeptide comprises a second CH3 domain.

38. The masked IL12 fusion protein of claim 1, wherein the IL12 activity is determined by measuring relative cell abundance or cytokine production of a cell or a cell line that is sensitive to IL12.

39. The masked IL12 fusion protein of claim 38, wherein the cell or cell line is selected from PBMC, CD8+ T cells, a CTLL-2 cell line and an NK cell line.

40. The masked IL12 fusion protein of claim 38, wherein the IL12 activity is determined by measuring IFNγ release by CD8+ T cells.

41. The masked IL12 fusion protein of claim 38, wherein the IL12 activity is determined by measuring the relative cell abundance of NK cells.

42. The masked IL12 fusion protein of claim 36, wherein the first CH3 domain or the second CH3 domain or both comprise an asymmetric amino acid modification wherein the first and second CH3 domain preferentially pair to form a heterodimer rather than a homodimer.

43. A masked interleukin 12 (IL12) fusion protein, comprising:
a. an Fc domain comprising a first Fc polypeptide and a second Fc polypeptide;
b. a masking moiety (MM); and
c. an IL12 polypeptide;
wherein the masking moiety is fused to the first Fc polypeptide by a first linker; and
optionally, wherein the masking moiety further comprises a second linker;
wherein the IL12 polypeptide is fused to the second Fc polypeptide by a third linker;
optionally, wherein at least one of the first, second or third linkers is protease cleavable; and
wherein the IL12 activity of the masked IL12 fusion protein is attenuated as compared to the IL12 activity of a control IL12 polypeptide.

44. A masked IL12 fusion protein, comprising:
a. an Fc domain comprising a first Fc polypeptide and a second Fc polypeptide;
b. a first MM and a second MM; and
c. an IL12 polypeptide;
wherein the IL12 polypeptide comprises a p35 polypeptide and a p40 polypeptide; wherein the first MM is fused to the first Fc polypeptide by a first linker; wherein the p35 polypeptide is fused to the first MM by a second linker; wherein the second MM is fused to the second Fc polypeptide by a third linker; and wherein the p40 polypeptide is non-covalently bound to the p35 polypeptide; and
wherein at least one of the first, second or third linkers is protease cleavable; and
wherein the IL12 activity of the masked IL12 fusion protein is attenuated as compared to the IL12 activity of the IL12 containing polypeptide released after cleavage of the at least one protease cleavable linker.

45. A masked IL12 fusion protein, comprising:
a. an Fc domain comprising a first Fc polypeptide and a second Fc polypeptide;
b. a first MM and a second MM; and
c. an IL12 polypeptide;
wherein the IL12 polypeptide comprises a p35 polypeptide and a p40 polypeptide; wherein the p35 polypeptide is fused to the first Fc polypeptide by a first linker; wherein the first MM is fused to the p35 polypeptide by a second linker; wherein the second MM is fused to the second Fc polypeptide by a third linker; and wherein the p40 polypeptide is non-covalently bound to the p35 polypeptide; and
wherein at least one of the first, second or third linkers is protease cleavable; and
wherein the IL12 activity of the masked IL12 fusion protein is attenuated as compared to the IL12 activity of the IL12 containing polypeptide released after cleavage of the at least one protease cleavable linker.

46. The masked IL12 fusion protein of claim 43, wherein the first MM is fused to the C-terminal end of the first Fc polypeptide and wherein the second MM is fused to the C-terminal end of the second Fc polypeptide.

47. The masked IL12 fusion protein of claim 45, wherein the p35 polypeptide is fused to the N-terminal end of the first Fc polypeptide and wherein the second MM is fused to the N-terminal end of the second Fc polypeptide.

48. A composition comprising the masked IL12 fusion protein of any one of claims 1 to 47 and a pharmaceutically acceptable excipient.

49. An isolated nucleic acid encoding the masked IL12 fusion protein of any one of claims 1 to 47.

50. An expression vector comprising the isolated nucleic acid of claim 49.

51. A host cell comprising the isolated nucleic acid of claim 49 or the expression vector of claim 50.

52. A method of making a masked IL12 fusion protein comprising culturing the host cell of claim 51 under conditions suitable for expression of the masked IL12 fusion protein and optionally, recovering the masked IL12 fusion protein from the host cell culture medium.

53. A method of treating cancer in a subject comprising administering to the subject a therapeutically effective amount of the composition of claim 48.

54. A masked interleukin 23 (IL23) fusion protein, comprising:
a. an Fc domain comprising a first Fc polypeptide and a second Fc polypeptide;
b. a masking moiety;
c. a first protease cleavable linker; and
d. an IL23 polypeptide;
wherein the masking moiety is fused to the first Fc polypeptide by the first protease cleavable linker; and optionally, wherein the masking moiety further comprises a second protease cleavable linker;
wherein the IL23 polypeptide is fused to the second Fc polypeptide; and
wherein the IL23 activity of the masked IL23 fusion protein is attenuated as compared to the IL23 activity of the IL23 containing polypeptide released after cleavage of the protease cleavable linker.

55. The masked IL23 fusion protein of claim 54, wherein the IL23 is a single chain IL23 polypeptide selected from a single chain IL23 polypeptide having the orientation p19-linker-p40 or p40-linker-p19.

56. The masked IL23 fusion protein of claim 54, wherein the single chain IL23 polypeptide is a p40-linker-p19 polypeptide that is fused to the second Fc polypeptide at the p40 polypeptide.

57. The masked IL23 fusion protein of claim 54, wherein the single chain IL23 polypeptide is a p19-linker-p40 polypeptide that is fused to the second Fc polypeptide at the p19 polypeptide.

58. The masked IL23 fusion protein of claim 56 or claim 57, wherein the single chain IL23 polypeptide is fused to the c-terminal end of the second Fc polypeptide.

59. The masked IL23 fusion protein of claim 56 or claim 57, wherein the single chain IL23 polypeptide is fused to the c-terminal end of the second Fc polypeptide and the masking moiety is fused to the c-terminal end of the first Fc polypeptide.

60. A recombinant polypeptide comprising a protease cleavable linker (PCL) wherein the protease cleavable linker comprises the amino acid sequence MSGRSANA (SEQ ID NO:10).

61. The recombinant polypeptide of claim 60 comprising two heterologous polypeptides, a first polypeptide located amino (N) terminally to the PCL and a second polypeptide located carboxyl (C) terminally to the PCL.

62. The recombinant polypeptide of claim 61, wherein the two heterologous polypeptides are selected from a cytokine polypeptide, an antibody, an antigen-binding fragment of an antibody and an Fc domain.

63. The recombinant polypeptide of claim 61, wherein the recombinant polypeptide comprises a cytokine polypeptide, a MM, and an Fc domain.

64. The recombinant polypeptide of claim 63, wherein the MM is a single-chain Fv (scFv) antibody fragment that binds to the cytokine or a cytokine receptor polypeptide or a cytokine-binding fragment thereof.

65. The recombinant polypeptide of claim 61, wherein the recombinant polypeptide comprises an antibody or antigen binding fragment thereof that binds a target, and a MM that binds to the antibody or antigen binding fragment thereof and blocks binding of the antibody or antigen binding fragment thereof to the target.

66. An isolated polypeptide comprising a PCL, wherein the PCL comprises the amino acid sequence of SEQ ID NO:10, wherein the PCL is a substrate for a protease, wherein the isolated polypeptide comprises at least one moiety (M) selected from the group consisting of a moiety that is located amino (N) terminally to the PCL (MN), a moiety that is located carboxyl (C) terminally to the PCL (MC), and combinations thereof, and wherein the MN or MC is selected from the group consisting of an antibody or antigen binding fragment thereof; a cytokine or a functional fragment thereof; a MM; a cytokine receptor or a functional fragment thereof; an immunomodulatory receptor, or functional fragment thereof; an immune checkpoint protein or a functional fragment thereof; a tumor associated antigen; a targeting domain; a therapeutic agent; an antineoplastic agent; a toxic agent; a drug; and a detectable label.
